United States Patent Application Publication US 2019/0002960 A1 - sequence listing, part 4

SEQ ID NO: 4 - DNA, 2980548 bp, Staphylococcus aureus Bmb9393 (residues 1-1,490,274 of 2,980,548)
gattaaagatagaaatacacgatgcgagcaatcaaatttcataacatcaccatgagtttgatccaaagcatgagtgtttacaatgtttgaataccttatacagttcttatacatactttataaattatttcccaagctgttttgatacacacactaacagatactctatagaaggaaaagttatccacttatgcacacttatactttttagaattgtggataattagaaattacacacaaagttatactatttttagcaacatattcacaggtatttgacatatagagaactgaaaaagtataattgtgtggataagtcgtccaactcatgattttataaggatttatttattgatatttacataaaaatactgtgcataactaataagcaggataaagttatccaccggttgttattaacttgtggataattattaacatggtgtgtttagaagttatccacggttgttatttttgtgtataacttaaaaatttaagaaagatggagtaaatttatgtcggaaaaagaaatttgggaaaaagtgcttgaaattgctcaagaaaaattatcagctgtaagttactcaactttcctaaaagatactgagctttacacgatcaaagatggtgaagctatcgtattatcgagtattccttttaatgcaaattggttaaatcaacaatatgctgaaattatccaagcaatcttatttgatgttgtaggctatgaagtaaaacctcactttattactactgaagaattagcaaattatagtaataatgaaactgctactccaaaagaagcaacaaaaccttctactgaaacaactgaggataatcatgtgcttggtagagagcaattcaatgcccataacacatttgacacttttgtaatcggacctggtaaccgcttcccacatgcagcgagtttagctgtggccgaagcaccagccaaagcgtacaatccattatttatctatggaggtgttggtttaggaaaaacccatttaatgcatgccattggtcatcatgttttagataataatccagatgccaaagtgatttacacatcaagtgaaaaattcacaaatgaatttattaaatcaattcgtgataacgaaggtgaagctttcagagaaagatatcgtaatatcgacgtcttattaatcgatgatattcagttcatacaaaataaagtacaaacacaagaagaatttttctatacttttaatgaattgcatcagaataacaagcaaatagttatttcgagtgatcgaccgccaaaggaaattgcacaattagaagatcgattacgttcgcgctttgaatgggggctaattgttgatattacgccaccagattatgaaactcgaatggcaattttgcagaagaaaattgaagaagaaaaattagatattccaccagaagctttaaattatatagcaaatcaaattcaatctaatattcgtgaattagaaggtgcattaacacgtttacttgcatattcacaattattaggaaaaccaattacaactgaattaactgctgaagctttaaaagatatcattcaagcaccaaaatctaaaaagattaccatccaagatattcaaaaaattgtaggccagtactataatgttagaattgaagatttcagtgcaaaaaaacgtacaaagtcaattgcatatccacgtcaaatagctatgtacttgtctagagagcttacagatttctcattacctaaaattggtgaagaatttggtgggcgtgatcatacgaccgtcattcatgctcatgaaaaaatatctaaagatttaaaagaagatcctatttttaaacaagaagtagagaatcttgaaaaagaaataagaaatgtataagtaggaaactttgggaaatgtaatctgttatataacagtactaataataacaatcattttttacatttctatatgctaatgtggcaagatgagcaaaactcattttgtggataatgtttaaaagtcatacacgccatacacaagttatcaacatgtgtataacttcgccaaatctatgtttttaagacttatccaccaatccacagcacctactactattactaagaacttaaaacctatataattatatataaacgactggaaggagttttaattaatgatggaattcactattaaaagagattattttattacacaattaaatgacacattaaaagctatttcaccaagaacaacattacctatattaactggtatcaaaatcgatgcaaaagaacatgaagttatattaactggttcagactctgaaatttcaatagaaatcactattcctaaaactgtagatggcgaagatattgtcaatatttcagaaacaggctcagtagtacttcctggacgattctttgttgatattataaaaaaattacctggtaaagatgttaaattatctacaaatgaacaattccagacattaattacatcaggtcattctgaatttaatttaagtggcttagatccagatcaatatcctttattacctcaagtttctagagatgacgcaattcaattgtcggtaaaagtgcttaaaaacgtaattgcacaaacgaattttgcagtgtccacctcagaaacacgcccagtactaactggtgtgaactggcttatacaagaaaatgaattaatatgcacagcgactgactcacaccgcttggctgtaagaaagttgcagttagaagatgtttctgaaaacaaaaatgtcatcattccaggtaaggctttagctgaattaaataaaattatgtctgacaatgaagaagacattgatatcttctttgcttcaaaccaagttttatttaaagttggaaatgtgaactttatttctcgattattagaaggacattatcctgatacaacacgtttattccctgaaaactatgaaattaaattaagtatagacaatggggagttttatcatgcgattgatcgtgcatctttattagcacgtgaaggtggtaataacgttattaaattaagtacaggtgatgacgttgttgaattgtcttctacatcaccagaaattggtactgtaaaagaagaagttgatgcaaacgatgttgaaggtggtagcctgaaaatttcattcaactctaaatatatgatggatgctttaaaagcaatcgataatgatgaggttgaagttgaattcttcggtacaatgaaaccatttattctaaaaccaaaaggtgacgactcggtaacgcaattaattttaccaatcagaacttactaaaaataaatataaataaaggatgacgtgattaattaaaacgtcatcctttattttttggcaaaaataattctagattcgtatgtaaaataaatttgacagcattttaaacagcaaataaaagacgccaattaaatttatgacaaatgtatccagaatttaataagtgtgcttatatgccctttaaattcaaaattttaatagtcaataacaagttgaatataaaagttaaacgccgttaaatagcgttaaaaaattgaaaatgacagtattgccaaaaaataagaattaattatttatatgtaaacggtttccacctctattttaaatgaaatttgtgacaaaaaaaggtataatatattaatgacatacaaagaaatggagtgattattttggttcaagaagttgtagtagaaggagacattaatttaggtcaatttctaaaaacagaagggattattgaatctggtggtcaagcaaaatggttcttgcaagacgttgaagtattaattaatggagtgcgtgaaacacgtcgcggtaaaaagttagaacatcaagatcgtatagatatcccagaattacctgaagatgctggttctttcttaatcattcatcaaggtgaacaatgaagttaaatacactccaattagaaaattatcgtaactatgatgaggttacgttgaaatgtcatcctgacgtgaatatcctcattggagaaaatgcacaaggaaagacaaatttacttgaatcaatttataccttagctttagcaaaaagtcatagaacgagtaatgataaggaactcatacgttttaatgctgattatgctaaaatagaaggtgagcttagttatagacacggcacgatgccattaacaatgtttataactaaaaaaggtaaacaagtcaaagtgaatcacttagagcaaagtcgtctaactcaatatattggacacctcaatgtggttctatttgcgccagaagatttgaatattgtaaaaggctctcctcaaataagacgacgctttatagatatggagttgggccaaatttctgctgtttacttaaatgatttagctcaataccaacgtattttaaagcaaaagaataattacttaaagcagttacaattaggccaaaaaaaggacttaacaatgttggaagtattaaatcaacagtttgctgaatatgcaatgaaagtaactgataaacgtgcacattttattcaagagctagagtcgttagctaaaccgattcatgctggtatcacaaatgataaagaagcgttgtcgctgaattatttacctagtcttaaatttgattatgctcaaaatgaagcggcacgacttgaagaaattatgtctattcttagcgataatatgcaaagagaaaaagaacgaggcattagcttattcggaccacatcgagatgatataagttttgatgtgaatggcatggatgctcaaacatatggttctcaaggacagcaacgtacaacggctttgtccattaaattagctgaaattgagttaatgaatatcgaagttggggaatatcccatcttattattagacgatgtactcagtgaattagatgattcgcgtcaaacgcatttattaagtacgattcagcataaagtacaaacatttgtcactacgacatctgtagatggtattgatcatgaaatcatgaataacgctaaattgtatcgtattaatcaaggtgaaattataaagtaacagaaagcgatggtgactgcattgtcagatgtaaacaacacggataattatggtgctgggcaaatacaagtattagaaggtttagaagcagtacgtaaaagaccaggtatgtatataggatcgacttcagagagaggtttgcaccatttagtgtgggaaattgtcgataatagtatcgatgaagcattagctggttatgcaaatcaaattgaagttgttattgaaaaagataactggattaaagtaacggataacggacgtggtatcccagttgatattcaagaaaaaatgggacgtccagctgtcgaagttattttaactgttttacatgctggtggtaaattcggcggtggcggatacaaagtatctggtggtttacatggtgttggttcatcagttgtaaacgcattgtcacaagacttagaagtatatgtacacagaaatgagactatatatcatcaagcatataaaaaaggtgtacctcaatttgacttaaaagaagttggcacaactgataagacaggtactgtcattcgttttaaagcagatggagaaatcttcacagagacaactgtatacaactatgaaacattacagcaacgtattagagagcttgctttcttaaacaaaggaattcaaatcacattaagagatgaacgtgatgaagaaaacgttagagaagactcctatcactatgagggcggtattaaatcttatgttgagttattgaacgaaaataaagaacctattcatgatgagccgatttatattcatcaatctaaagatgatattgaagtagaaattgcgattcaatataactcaggatatgccacaaatcttttaacttacgcaaataacattcatacgtacgaaggtggtacgcatgaagacggattcaaacgtgcattaacgcgtgtcttaaatagttatggtttaagtagcaagattatgaaagaagacaaagatagactttctggtgaagatacacgtgaaggtatgacagcaattatatctatcaaacatggtgatcctcaattcgaaggtcaaacgaagacaaaattaggtaattctgaagtgcgtcaagttgtagataaattattctcagagcactttgaacgatttttatatgaaaatccacaagtcgcacgtacagtggttgaaaaaggtattatggcggcacgtgcacgtgttgctgcgaaaaaagcgcgtgaagtaacacgtcgtaaatcagcgttagatgtagcaagtcttccaggtaaattagccgattgctctagtaaaagtcctgaagaatgtgagattttcttagtcgaaggggactctgccggggggtctacaaaatctggtcgtgactctagaacgcaggcgattttaccattacgaggtaagatattaaatgttgaaaaggcacgattagatagaattttgaataacaatgaaattcgtcaaatgatcacagcatttggtacaggaatcggtggcgactttgatctagcgaaagcaagatatcacaaaatcgtcattatgactgatgccgatgtggatggagcgcatattagaacattgttattaacattcttctatcgatttatgagaccgttaattgaagcaggctatgtgtatattgcacagccaccgttgtataaactgacacaaggtaaacaaaagtattatgtatacaatgatagggaacttgataaacttaaatctgaattgaatccaacaccaaaatggtctattgcacgatacaaaggtcttggagaaatgaatgcagatcaattatgggaaacaacaatgaaccctgagcaccgcgctcttttacaagtaaaacttgaagatgcgattgaagcggaccaaacatttgaaatgttaatgggtgacgttgtagaaaaccgtagacaatttatagaagataatgcagtttatgcaaacttagacttctaagcgctgtgaactgaacttttgaaggaggaactcttgatggctgaattacctcaatcaagaataaatgaacgaaatattaccagtgaaatgcgtgaatcatttttagattatgcgatgagtgttatcgttgctcgtgcattgccagatgttcgtgacggtttaaaaccagtacatcgtcgtatactatatggattaaatgaacaaggtatgacaccggataaatcatataaaaaatcagcacgtatcgttggtgacgtaatgggtaaatatcaccctcatggtgacttatctatctatgaagcaatggtacgtatggctcaagatttcagttatcgttatccgcttgttgatggccaaggtaactttggttcaatggatggagatggcgcagcagcaatgcgttatactgaagcacgtatgactaaaatcacacttgaactgttacgtgatattaataaagatacaatagattttatcgataactatgatggtaatgaaagagagccgtcagtcttacctgctcgattccctaacttgttagccaatggtgcatcaggtatcgcggtaggtatggcaacgaatattccaccacataacttaacagaattgatcaatggtgtacttagcttaagtaagaatcctgatatttcaattgctgagttaatggaagatattgaaggtcctgatttcccaactgctggacttattttaggtaagagtggtattagacgcgcatatgaaacaggtcgtggttcaattcaaatgcgttctcgtgcagttattgaagaacgtggaggcggacgtcaacgtattgttgtcactgaaattcctttccaagtgaataaggctcgtatgattgaaaaaattgcagagcttgttcgtgacaagaaaattgacggtattactgatttacgtgatgaaacaagtttacgtactggtgtgcgtgtcgttattgatgtgcgtaaggatgccaatgctagtgtcattttaaataacttatacaaacaaacacctcttcaaacatcatttggtgtgaatatgattgctctagtgaatggtagaccgaagctgattaatttaaaagaagcgttagtacattatttagagcatcaaaagacagttgttagaagacgtacgcaatacaacttacgtaaagctaaagatcgtgcccacattttagaagggttacgtattgcgttagatcatatcgatgaaattatttcaacgattcgtgaatcagaaacagataaagtcgcaatggaaagtttgcaacaacgcttcaaactttctgaaaaacaagctcaagctattttagacatgcgtttaagacgtctaacaggtttagagagagacaaaattgaagctgaatataatgagttattaaattatattagtgaattagaagcaatcttagctgatgaagaagtgttattacagttagttagagatgaattgactgaaattagagatcgcttcggtgatgatcgtcgtactgaaattcaattaggtggatttgaagacttagaggacgaggacttaattccagaagaacaaattgtaattactttgagccataataactatattaaacgtttgccggtatctacatatcgtgctcaaaaccgtggtggtcgtggtgttcaaggtatgaatacattggaagaagattttgtcagtcaattggtaactttaagtacacatgaccatgtattgttctttactaacaaaggtcgtgtatacaaactaaaaggttatgaagtgcctgagttatcaagacagtctaaaggtattcctgtagtgaatgctattgaacttgaaaatgatgaaatcattagtacaatgattgctgttaaagaccttgaaagtgaagataacttcttagtgtttgcaactaaacgtggtgtcgttaaacgttcagcattaagtaacttctcaagaataaatagaaatggtaagattgcgatttcgttcagagaagatgatgagttaattgcagttcgcttaacaagtggtcaagaagatatcttgattggtacatcacatgcatcattaattcgattccctgaatcaacattacgtcctttaggccgtacagcaacgggtgtgaaaggtattacacttcgtgaaggtgacgaagttgtagggcttgatgtagctcatgcaaacagtgttgatgaagtattagtagttactgaaaatggttatggtaaacgtacgccagttaatgactatcgtttatcaaatcgtggtggtaaaggtattaaaacagctacgattactgagcgtaatggtaatgttgtatgtatcactacagtaactggtgaagaagatttaatgattgttactaatgcaggtgtcattattcgactagatgttgcagatatttctcaaaatggtcgtgcagcacaaggtgttcgcttaattcgcttaggcgatgatcaatttgtttcaacggttgctaaagtaaaagaggatgcagacgaagaaaatgaagatgaacaatctactgtatctgaagatggtactgaacaacaacgtgaagcggttgtaaatgatgaaacaccaggaaatgcaattcatactgaagtgattgattcagaagtaaatgatgaagatggacgtattgaagtaagacaagatttcatggaccgtgttgaagaagacatacaacaatcatcagatgatgatgaagaataataaaaaaataagacttccctatatgtaggggggtcttatttttatgctagaaagtaatgctatactatattcaatgattagtaatgactaactttctaattgtttcattgcgtaaggtatttcattgataagtcttgatggtggcaccacatacatatcttttgcaagattttcgccaataaaactatgtgtatatgtggcactcataaccgcttcttttaagttatcaaattgaccaacaaaacttgtaatcataccagcaagtgtatcgcccataccaccagtcgccattgctgggctaccgattgtcaatttaaagtcttcatctttaaagaaaatttcagtaccgtgttttttaagtacaacagttgcgcctaaacgatcaactgcttcacgattacgctcatatgtctgttcctcaataggaataccacttaatcgttcccattctttgagatgcggagtaaaaatcacgcgacatgtaggtaattgtggtttcaatttactaaagattgtgatggcatcgccgtctacgattaaattttgatgcggttgtatattttgtagtaggaatgtaatggcattatttcctttgaaatcaacgccaagacctggaccaattagtatactgtcagtcatttcaatcattttcgtcaacattttcgtatcattaatatcaataaccatcgcttctgggcaacgagaatgtaatgctgaatgatttgttggatgtgtagctacagtgattaaaccactaccgctaaatacacatgcacgagccgctaacataatggcaccacctaagttagcagatccaccaattaataaaattttgccataatcacctttatgtgaatcttctttacgcttaggaatgttaatagaatttaacgtttccatagtgatataacctcccatgtaaaagccttttccgaatttattcaattttaaaaatatatagtaacttttaacaaaatgtattataaatttctgaattcattattatttgtcgttaaatacaatagaaaatactatacctgtatatgcaattcgtcaatagataaattattaaatatgcttacaacaatcttaatatcctttaacgcactacaatagtgctctgataataggttataaatgtacgtaaaaccattgtttcaataaaaatgaaaacgtatacttcaagaaggatgggttacttaatataaacaagggggtaacatatatgactttatatttagatggtgaaacactaacaattgagtatattaaatcatttttacaacaacaatcaaagattgaaattattgatgatgcgttagaacgtgtcaaaaaaagtagagcagtagttgaacgtattattgaaaatgaggaaacggtttacggtatcactacaggttttgggttatttagtgatgtacgtatagacccgacgcaatataacgaattacaaatgaatctgatacgctcacatgcctgtggactaggtgagccattttcaaaagaagtagcattagtcatgatgattttacgattgaatacattattaaaaggtcattcaggtgccactttagaattagtgagacaattacaattttttataaatgaacgtattataccgataatcccacagcaaggctctctcggtgcatcaggagatttagcgccattatcacatttagcattagcattaattggtgaagggaaagtattgtacagaggtgaagaaaaggatagtgacgatgtattaagagaattaaatagacaacctttgaaccttcaggctaaagaaggtttagcattgattaatggtacgcaagctatgacagctcaaggtgtcattagttatatagaagcagaagatttaggttaccaatctgaatggattgctgcattaacgcatcagtctcttaatggcattatagatgcatatcgacatgatgtgcacgctgttcgtaattttcaagaacagattaatgtggcagcgcgtatgcgtgattggttagaaggatcaacattaacgacgcgacaagcagaaatacgtgtacaagatgcatatacattgcgttgtataccacaaatccatggcgcgagttttcaagtattcaattatgttaaacagcaattagaatttgaaatgaatgcggctaatgataatccacttatatttgaggaagcaaatgcaacgtttgttatttcgggtggtaacttccatggacaacctattgcttttgcattagatcatcttaaattaggtgtaagtgaattagcaaacgtatcggaacgtcgtctagagcgactagtaaatcctcaattaaatggtgatttaccagcatttcttagtccagagccaggattgcaaagtggcgcgatgattatgcaatatgctgctgcaagtctcgtttctgaaaataaaactttagcgcatccagcgagtgttgattctatcacttcatctgcgaaccaagaagatcacgtatctatgggaactacagctgctagacatggttatcaaattattgaaaatgcaagacgtgtgttggcaatcgaatgtgttattgcattacaagcagcagagttgaaaggtgtcgaaggattatcaccaaaaacacgtcgcaagtatgatgagtttcgaagtatcgtgccatccattacatatgaccgtcaatttcataaagatattgaagcggttgcacagtatttaaagcaatcaatttatcaaacgactgcatgtcactaaatcgacatgattgatgtttgaaatcgttacttgaaaaagcaaatatagtttgctatattaaaaataacttaataagacattgttcgtaggacaagtaatatatagtgttcgatatcagagagcttgtggttagtgtgaacaagaatcaacatatatatgaatctacctacttatttaaaagaacaatcggtgataaccgttattttagtgaagtgcaatttaggtttagtgtatctttataacttaaattgttaaatagggtggcaacgcgtagaccacgtcccttgtagggatgtggtctttttttattttctaaaaaataaagacgtgcgtcattccataataaatgataattatttgggaaaggatgaaggttaatgttagacattagattattcagaaatgagcctgacacagttaagagcaaaattgaattacgcggagatgatccaaaagttgtagatgaaattttagaattggatgagcaacgacgtaaattaattagtgcaacagaagaaatgaaagcacgtcgtaataaagtaagcgaagaaatcgcattaaaaaaacgtaataaagaaaatgctgatgatgtgattgctgaaatgcgcacattaggtgacgatattaaagaaaaagatagtcaattaaatgaaattgatagtaaaatgacaggtatcctttgtcgtattccaaatttaataagtgatgatgtacctcaaggtgaatctgatgaagataacgttgaagttaaaaagtggggtacaccacgtgagttttcatttgaaccaaaagcacattgggatattgtagaagaattgaaaatggctgattttgatcgtgcagcaaaagtttcaggtgcgcgttttgtatatttaacaaatgaaggtgcgcaattagagcgtgctttaatgaactatatgattacaaaacatacaacacaacatggttatacagaaatgatggtaccacagcttgtaaacgcagatacaatgtatggtacaggtcaattacctaaatttgaagaagatttatttaaagtagaaaaagaaggattatatacaattccaactgctgaagtaccattaacgaatttctatcgtaatgaaattattcaaccaggtgtacttcctgaaaaattcactggtcaatctgcatgtttccgtagtgaagcaggatcagcaggtagagatacaagaggattaattcgtttacatcaattcgataaagtggaaatggtacgttttgaacaacctgaagattcatggaatgctttagaagaaatgacaacaaacgcagaagcaattttagaagagttaggtttaccataccgtcgtgttattttatgtacaggtgatattggatttagtgcaagcaaaacatatgatttagaagtttggttaccaagctacaatgattataaagaaattagttcatgctcaaactgtacggatttccaagcgcgtcgtgctaacatccgcttcaagcgtgacaaagcagctaaaccagaattagcacatacattaaatggtagtggtttagcagttggacgtacatttgctgctattgttgaaaattaccaaaatgaagatggaacagtaacaattccagaagcattagtaccatttatgggtggtaaaacacaaatttcaaaaccagttaaataaagactttagctacaagctttaaaaagtatatatctacgtatacttaaagcaaggccaagatactttaaataatattttaaaaagtggtgacgaagctgtcgccactttttttgtgctgtaaaagtataatagtgagccaatgcacataacaacaataaattaagtttgttgtttaatggggtgaacgcatttcattatagcaacaatacgggataattatgatgaactaaaacaatctaaaacgtaacaattttgagcatcactattatgggaaattaagtgataaaaaactgatttcgttgatgtagtatgagtaatatcgatgcagtagggtaggggggattatcgaaagtgttagagacatgaatcaatatcccagactcatcattagatataaaaaattataaaattagtacttaaaaacaactacaaacccgtagaaaatatggaggtagtattaaataaaatattgaaaattctcaaaactaaaaagctgatatgaagccgattaaagactccggtatgtctaacctcagacaaaccggagtctaacgttattgcttgtcatatagaactatattagactaggtatattattttttcgtaattatataaatataaagtgaaaaaggaggtaattgagatgacaacacatttgagttttagacaaggcgtgcaagagtgtatcccaacattattgggttatgccggtgttggtatttcatttggtatcgtggcttcatctcaaaactttagtattttagaaattatcttgttatgtcttgttatatatgccggtgctgcgcaatttattatgtgcgcgttgtttatagcaggtacaccgatatcagcgattgtactaactgtatttatcgtaaattcaagaatgttccttttaagtatgtcgcttgcaccaaacttcaagacatatgggttttggaaccgtgttggattaggttcattagtaactgacgaaacgtttggtgtcgccattacaccttatttaaaaggagaagctatcaatgatcgttggatgcatggtcttaatattacagcatatttattttgggtaattccatgtgtagcaggtgcattgtttggcgagtatatttcgaatccacaagcattaggattagattttgctatcacggctatgtttatctttttagccattgcacaatttgaatcaattactaaatcgcgtttaagaatttacatagtactcattattgccgtcatagtaatgatgttatcgctaagtatgtttatgccttcatatctagcaatattaattgcagccacaatttcagcagcgttaggagtgatgatggaacgatgataactcatatgaacatgttaatacttattttattgtgtggaatcgtaacgctattaattcgaattataccttttatcatgatttcaaaagtgcaattgcctgatgtcgtggttcgatggctatcatttatcccaatcacactatttacggcacttgtcattgacagcattattcaacagacgcctcatggtgaggggtatacattaaacatcccttacattatcgcgctcattccgacggttattttatctataatcacgcgtagtttaactattacaattattagtgggattgttatcatggcagcattacgatttttcttttaaaaataactgaaaatcattgaacagatatttaaacttaggtaaactgttagtaatcagaaaattctgatatacaaatcatctatgttaagattgggaatcgtgtatacgtaagcgatttggctaacgcatgacaatgataacaacattttaaatgataaaagtaattcatcactgaatctcaactaacacataacaatttcatatttcttattgtgagaagttgagggacttggccctgtgatacttcagcaaccgactttatagcacggtgctaaaaccaacgagttactcgaatgataagtataaagacttcttacttttcaatagggtgagaagttttttgtttaaggaggaaagaacaatgacaaattacacagtagatactttaaatttaggggaatttataacaggatctggggaagtcatagataacttgcgtttgagatatgagcatgtcggttatcatggacaaccattagttgtagtttgtcatgcattaactggcaatcatttaacatatggaacagatgattatccggggtggtggcgagaaattattgatgggggatatgtgcctattcatgactatcaatttttaacatttgatgttattggtagtcctttcggttcaagttcacctttaaacgaccctcattttcctaaaaaattaacattaagagatattgttagagcgaatgaacgaggtatacaagcgcttggttatgacaaaattaatattttaatagggggaagtcttggaggtatgcaagcaatggaactactttacaatcgacagtttgaagtagataaagccattattcttgctgcaacaagtcgaacatcatcttatagtagagctttcaatgaaattgcgcgtcaggccattcatcttggtggtaaggaaggtctaagtattgcacgccaattaggttttttgacatatcgatcatcgaaaagttatgatgaacgtttcacaccggatgaagtagtcgcataccagcaacatcaaggtaataaatttaaagaacgattcgatttgaattgttatctgacactgctagatgtattggatagtcacaacattgaccgaggtcgcacagacgtaacgcatgtttttaaaaatttagaaacgaaagtcttaacaatgggctttatagatgatttgctatatccggatgatcaagttcgtgctttaggtgaacgttttaaatatcatcgtcatttctttgtacctgataacgttgggcatgatggattcctactaaactttagtacctgggcacctaacttatatcatttcttaaatttaaagcattttaagcgcaagtaataatgtatatattttcaaagaatgaagccactaaatcacagttatcatattcaaaaacatctagagtacatgagagtggaaatgaattgtaaatctaaatcaagcttgattgctatgtagtgggattaaataatcatgttgaaaatgaaagcacacaaaagcgatttaaatgagtatgttaattacttataaaacatgaaagttattattcaattaaatgaaatagaagcatacaatctataaattgttaatttccattaaagaggttaaaataatagctatagttaaaaatatgggagtggcttatgtgttttcaaaaatacaacctaaagcaacaatgattgcaacgattacgttggtatttgtcgctttagctttatatctagtgcctggtttaggactaatatttgcattatttgcaaccataccaggtatcgttttatggaataaatcaatacaatctttcgggattagtgcacttattacagtaattataacaactgttttaggtaatactttcgttttaagtgctatcatattagtcttaattgcaagtttaattattggtcaattgctcaaagaaagaacgtctaaagaaagaatattatacgtaacaaccgtagcgatgagcttaatttcattaatcgcctttatgttactacaaacattcggaagaattccaccatcagcgagcatagtaaaacctttcaagcaaacattacatgaagcgattacgatgagcggtgccgatgcgaatatgacccaaatattagaagaagggtttagacaagcgaccgttcaattaccaggtttcatcattatcattacatttttaatcgtcttaattaacttaatcgttacatttccgattttacgaaaatttaaaatcgctacacctgtatttaagccacttttcgcgtggcaaatgagcggtattttattatggatatacattattgttatcatatgtttattatttacaggtcaaccgagtgtgttccagagcattcttttaaatttccaacttgtgttatcattagtgatgtatattcaaggtttaagtgttattcatttctttggtaaagcgaaaggtttgccgaatgcagtaacgattttactattggttatcggtacaatactgacacctacgacgcatattgtaggactacttggtgttatcgatttaagtttgaatttgaagcgaatcatgaaaaataattctaaaaagtgaatagaggtggaataatgaatcggcagtccactaagaaagctttactaataccatttgtcatcatgatcatcacagcaattgttttaatgggtgtatggtttatctttaatagccttatagcattaattgcatctatcgttcttgtcgtgatgattattgttagcatcgttttattcagacaagctttaatgaaaatggatagttatgtagatggtttgagtgctcaaatttcaacaacaaataataaagcaatcaaacatttaccaattggtatcattgttttagatgaaaatgatcacatcgaatgggttaaccaatttatgacagatcatatggaagcaaatgtcatttctgaatctgtaaatgaagtatttccaaacattttaaagcaattagatagagtgaaatccgttgaaatagaatataatcagtatcatttccaagtacgttattctgagaatgatcactgcctctatttctttgatataactgaacaagtacaaacaaatgaactatatgaaaattctaaaccaatcattgcgacattatttttagacaactacgatgagattacgcaaaatatgaatgatacgcagcgttcggagatcaattcaatggtaacgcgtgtcattagtcgatgggcaactgagtataatatattctttaaaaggtatagttccgatcaattcgtagcctatttaaatcaaaaaatattagctgacttagaagaatctaaatttgatatcttgagtcaattacgtgaaaaaagtgttggttatcgtgcccaattaacattaagtatcggtgttggtgaaggcactgaaaatttaatcgacttaggtgaattatcacaatcaggcctagacttagcattaggacgtggtggtgaccaagttgcaattaaaagtattaatggtaatgtgcgcttctatggcggtaagactgacccgatggagaaacgtactcgtgtaagagcacgtgttatctcacatgcgttaaaagacatccttgcagagggtgacaaagtcattatcatgggacataaacgtcctgacttagatgcaattggtgcagcaatcggtgtgtctagatttgcaatgatgaataatttagaagcatacatcgtattaaatgagactgacattgatccaacattacgacgcgtgatgaacgaaattgataaaaagccagagttaagagagcgatttattacatcagatgatgcttgggatatgatgacatctaagacaaccgtagtgattgttgatacgcataaaccggaactggttttagatgaaaatgtcttaaataaagcaaaccgtaaagttgttatcgatcatcatagacgtggtgaaagcttcatctctaatccattgttgatatatatggaaccatacgcaagttcaacagcagaacttgtaacagaattactggaatatcaaccaacagaacaacgtttaacgcgtcttgaatcaacagtgatgtatgcaggtattattgtagatacaagaaactttacattacgaacaggatcaagaacattcgatgcagcgagttatttacgtgcacatggtgcagatacgattttaacgcaacatttcttaaaagatgatgtggatacttacattaatcgatctgaattaattcgaactgtaaaagttgaagataatggcatagccattgcgcatggttcagacgataaaatttatcatccagtaacagttgcacaagcagcagatgaactgttaagtttagaaggtattgaagcatcatatgttgttgcgagacgtgaagataatctgattggtatatctgcgcgttcactcggttcagtaaatgtccagttaacaatggaagcacttggtggcggtggacatttaaccaatgctgcaacacaacttaaaggtgtgacagtcgaagaggcgatagcacaattacaacaagcaattacagaacaattaagtaggagtgaagatgcatgaaagtaatttttacacaagatgttaaaggtaaaggtaaaaaaggtgaagttaaagaagtaccagtaggttatgcaaataacttcttattgaaaaagaattatgctgtagaagcaacaccaggtaacctgaaacaattagagttacagaaaaaacgtgcaaaacaagaacgccaacaagaaattgaagatgctaaagcattaaaagaaactttatcaaacattgaagttgaagtatcagcaaaaactggtgaaggtggtaaattgtttggatcagtaagcacaaaacaaattgccgaagcactaaaagcacaacatgatattaaaattgataaacgtaaaatggatttaccaaatggaattcattccctaggatatacgaatgtacctgttaaattagataaagaagttgaaggtacaattcgcgtacacacagttgaacaataaagttggattgaaataagaggtgtaaccattcatggatagaatgtatgagcaaaatcaaatgccacataacaatgaagctgaacagtctgtcttaggttcaattattatagatccagaattgattaatactactcaggaagtgttgcttcctgagtcattttataggggtgcccatcaacatattttccgtgcaatgatgcacttaaatgaagataataaagaaattgatgttgtaacattgatggatcaattatcgacggaaggtacgttgaatgaagcgggtggcccgcaatatcttgcagagttatctacaaatgtaccaacgacgcgaaatgttcagtattatactgatatcgtttctaagcatgcattaaaacgtagattaattcaaactgcagatagtattgccaatgatggatataatgatgaacttgaactagatgcgattttaagtgatgcagaacgtcgaattttagagctatcatcttctcgtgaaagcgatggctttaaagacattcgagacgtcttaggacaagtatatgaaacagctgaagagcttgatcaaaatagtggtcaaacaccaggtattcctacaggatatcgagatttagaccaaatgacagcagggttcaaccgaaatgatttaattatccttgcagcgcgtccatctgtaggtaagactgcgttcgcacttaatattgcacaaaaagttgcaacgcatgaagatatgtatacagttggtattttctcactagagatgggtgctgatcagttagccacacgtatgatttgtagttctggtaatgttgactcaaaccgcttaagaaccggtactatgactgagaaagattggagtcgttttactatagcggtaggtaaattatcacgtacgaagatttttattgatgatacaccgggtattcgaattaatgatctacgttctaaatgtcgtcgattaaagcaagaacatggcttagacatgattgtgattgactacttacagttgattcaaggtagtggttcacgtgcgtctgataacagacaacaggaagtttctgaaatctctcgtacattaaaagcattagcccgtgaattagaatgtccagttatcgcattaagtcagttatctcgtggtgttgaacaacgacaagataaacgtccaatgatgagtgatattcgtgaatctggttcgattgagcaagatgccgatatcgttgcattcttataccgtgatgattactataaccgtggtggcgatgaagatgatgacgatgatggtggtttcgagccgcaaacgaatgatgaaaacggcgaaattgaaatcatcattgctaagcaacgtaatggtccaacaggcacagttaagttacactttatgaaacaatataataaatttacagatatcgattatgcacatgctgatatgatgtaaaaaaagtttttccgtacaataatcattttagtgataaaattgtacggtttttattttgttctgaacgggttgatatatgttaagtttgtgtattggaagtgatgaattagtgctgtcaaagactctgttaaagggttttgaggacgttgaagacgatttgttaaaatgatttttcttttaaaaaggctgaaaatcaatgttcgatttttatttgcattatggtctcgatattggtagaatatcaaatggttaaatgagaaaaacttggaggtgctcacatgtcatcaatcgtagtagttgggacacaatggggagacgaaggaaaaggaaaaataacggatttcttggcagaacagtcagatgttatcgcgcgtttttcaggtggtaataatgcaggccataccattcaatttggcggagaaacatataaattacatttagtaccatctggtatcttttacaaagacaaattagcggtaatcggtaacggagtcgttgttgatccagttgcactattgaaagaattagacggattaaatgaacgtggcattcctacaagtaatttacgtatatctaatcgtgcgcaagtgattttaccatatcacttagcacaagatgaatatgaagaacgtttacgcggtgataataagattggtacaactaaaaaaggtatcggtccagcatatgtagacaaagttcaacgtatcggtattcgtatggcagatttacttgaaaaagaaacattcgaaagattattaaaatcaaacattgaatataaacaagcatatttcaaaggcatgtttaacgaaacatgcccatcatttgatgatatctttgaagaatattatgcagcaggtcaacgtctaaaagaatttgtaacagacacatcaaaaatcttagacgatgcatttgtagcagatgaaaaggtacttttcgaaggtgcgcaaggtgtaatgttagatatcgaccatggtacatatccattcgttacatcaagtaatccaattgcaggtaacgttactgttggtacaggtgtaggtcctacattcgtttcaaaggtaattggtgtatgtaaagcttatacatcacgtgttggtgatggtccattccctactgaattattcgatgaagatggacatcatattagagaagttggtcgtgaatacggtacaacaacaggacgtccacgtcgtgtaggttggtttgattcagttgtattacgtcactctcgtcgtgtaagtggtattacagatttatctattaactcaattgatgttttaacaggcctagacacagtgaaaatctgtacagcttatgaattagacggtaaagaaattactgagtacccagcaaacttagatcaattaaaacgttgtaaaccaatctttgaagagctaccaggttggacagaagacgtaacaagtgtgcgtactttagaagaattacctgaaaatgcacgtaaatatttagagcgtatttcagaattatgtaatgtacaaatttctatcttctcagttggtccagatagagaacaaacaaatctattaaaagaattgtggtaaaactttatataagtcatacacaatgattataaatacatgagccttctatctttattggtaggaggcttttgttatgtttgcttctgtatcgattcgattatttagataaaaaatactaacgtaaaggtggtatttgctagtcataatttagaagattagatgatatttaatgaaaattaagataaaatacttgaatgtaggaagtctgatgtcgaaaatgactattaaaatagagtagacgtaagtgtgaatgcaagtatctaaaatagaaaaatttcaaaaatagcgtaattattataataaatagactgccaataaaatgcaatttttcacttataacattcttcaaaaaataatagcaaaattatgtaaaaaatatcttgtcatggcaagattggctgtgctataatctatcttgtgcttaagaacggctccttggtcaagcggttaagacaccgccctttcacggcggtaacacgggttcgagtcccgtaggagtcaccattttttaggtctcgtagtgtagcggttaacacgcctgcctgtcacgcaggagatcgcgggttcgattcccgtcgagaccgtacaaatgcctatccaagaggataggcattttttgcgtttaatattatattaataaaagacatatggacgaatgataatcatattgatttatctgttcgtccattttctttataatgtataaacttctggtaattcagttgcaatgtattaaagacaaatatagaaaacaaattttttaattagattaccatgtgcctttattaacatactttttcatagtgatagaccaaaagagctcacttaacataaatataatagtatttattttcctcacatccacaccaataggaatcccgattttttcgcacctttaataatataaaaatgatttcgtggtcatattatagggaaatactaatcattatcataatccgccgtgagaaattaataaaaaatattaatatataagtttatattggaaaatagaattaatagcttataaatggtaaattatataataggttactatacgttataagacggaaaatgcgcacaataacaaaaatagtaagcgacatcctgtgattttttacacaaacataaacgataaagaacaaaaaatgataaaataatattaatgatttaagaaaagaggtttatgcaaatggctagaaaagttgttgtagttgatgatgaaaaaccgattgctgatattttagaatttaacttaaaaaaagaaggatacgatgtgtactgtgcatacgatggtaatgatgcagtcgacttaatttatgaagaagaaccagacatcgtattactagatatcatgttacctggtcgtgatggtatggaagtatgtcgtgaagtgcgcaaaaaatacgaaatgccaattataatgcttactgctaaagattcagaaattgataaagtgcttggtttagaactaggtgcagatgactatgtaacgaaaccgtttagtacgcgtgaattaatcgcacgtgtgaaagcgaacttacgtcgtcattactcacaaccagcacaagacactggaaatgtaacgaatgaaatcacaattaaagatattgtgatttatccagacgcatattctattaaaaaacgtggcgaagatattgaattaacacatcgtgaatttgaattgttccattatttgtcaaaacatatgggacaagtaatgacacgtgaacatttattacaaacagtatggggctatgattactttggcgatgtacgtacagtcgatgtaacgattcgtcgtttacgtgaaaagattgaagatgatccgtcacatcctgaatatattgtgacgcgtagaggcgttggatatttcctccaacaacatgagtagaggtcgaaacgaatgaagtggctaaaacaactacaatcccttcatactaaacttgtaattgtttatgtattactgattatcattggtatgcaaattatcgggctgtattttacaaataaccttgaaaaagagctgcttgataattttaagaagaatattacgcagtacgctaagcaattagaaattagtattgaaaaagtatatgacgaaaagggctccgtaaatgcacaaaaagatattcaaaatttattaagtgagtatgccaaccgtcaagaaattggagaaattcgttttatagataaagaccaaattattattgcgacgacgaagcagtctaaccgtagtctaatcaatcaaaaagcgaatgatagttctgtccaaaaagcactatcactaggacaatcaaacgatcatttaattttaaaagattatggcggtggtaaggaccgtgtctgggtatataatatccccgttaaagtcgataaaaaggtaattggtaatatttatatcgaatcaaaaattaatgacgtttataaccaattaaataatataaatcaaatattcattgttggtacagctatttcattattaatcacagtcatcctaggattctttatagcgcgaacgattaccaaaccaatcaccgatatgcgtaaccagacggttgaaatgtccaaaggtaactatacgcaacgtgtgaagatttatggtaatgatgaaattggcgaattagctttagcatttaataacttgtctaaacgtgtacaagaagcgcaggctaatactgaaagtgagaaacgtagactggactcagttatcacccatatgagtgatggtattattgcaacagaccgtcgtggacgtattcgtattgtcaatgatatggcacttaagatgcttggtatggcgaaagaagacatcatcggatattacatgttaagtgtattaagtcttgaagatgaatttaaacttgaagaaattcaagagaataatgatagtttcttattagatttaaatgaagaagaaggtctaatcgcacgtgttaactttagtacgattgtgcaggaaacaggatttgtaacgggttatatcgctgtgttacatgacgtgactgaacaacaacaagttgaacgtgagcgtcgtgaatttgttgccaatgtatcacatgagttacgtacacctttaacttctatgaatagttacattgaagcacttgaagaaggtgcatggaaagatgaggaacttgcgccacaatttttatctgttacccgtgaagaaacagaacgaatgattcgactggtcaatgacttgctacagttatctaaaatggataatgagtctgatcaaatcaataaagaaattatcgactttaacatgttcattaataaaattattaatcgacatgaaatgtctacgaaagatacaacatttattcgagatattccgaaaaagacgattttcacagaatttgatcctgataaaatgacgcaagtatttgataatgtcattacaaatgcgatgaaatattctagaggcgataaacgtgtcgagttccacgtgaaacaaaatccactttataatcgaatgacgattcgtattaaagataatggcatcggtattcctatcaataaagtcgataagatattcgaccgattctatcgtgtagataaggcacgtacgcgtaaaatgggtggtactggattaggactagccatttcgaaagagatcgtggaagctcacaatggtcgtatttgggcaaacagtgtagaaggtcaaggcacatctatctttatcacacttccatgtgaagtcattgaagacggtgattgggatgaataataaggaacatattaaatctgtcattttagcgctactcgtcttgatgagtgtcgtattgacatatatggtatggaacttttcgcctgatattgcaaatgtcgacaatacagatagtaagaagagtgaaacgaaacctttaacgacacctatgacagccaaaatggatacaactattacgccatttcagattattcattcgaaaaatgatcatccagaaggtacgattgcgacggtatctaatgtaaataagctgacgaaacctttaaaaaataaagaagtgaagtccgtggaacatgttcgtcgtgatcataacttgatgattcctgatttgagcagtgattttacattattcgattttacgtatgatttaccgttatcaacatatcttggccaagtactgaacatgaatgcgaaagtaccaaatcatttcaatttcaatcgtttggtcatagatcatgatgctgatgataatatcgtgctttatgctataagcaaagatcgccacgattacgtaaaattaacaactacaacgaaaaatgatcattttttagatgcattagcaacagtgaaaaaagatatgcaaccatacacagatatcatcacaaacaaagatacaattgatcgtacgacgcatgtttttgcaccaagtaaacctgaaaagttaaaaacatatcgcatggtatttaacacgattagtgttgagaaaatgaatgctatactatttgacgattcaaccatcgttcgtagttcaaagagtggtgttacaacttacaacaataatacaggtgtcgcaaactataacgataaaaatgaaaaataccattataaaaacttgtccgaagatgaagcaagttcaagcaaaatggaagaaacgattccaggaacctttgattttattaatggtcatggtggtttcttaaacgaagacttcagattgtttagtacgaataatcagtcaggcgagctaacatatcaacgtttccttaatggttatccaacgtttaataaagaaggcgctaatcaaattcaagtcacttggggtgaaaagggcgtctttgattatcgtcgttcgttactgcgcaccgatgttgtgttaaatagtgaggataataaatcgttgccgaaattagagtctgtacgttcaagcttagcgaacaatagtgatattaattttgaaaaagtaacaaacatcgctatcggttacgaaatgcaagataatccggatcataatcacattgaagtgcagattaacagtgaactcgtaccgcgttggtatgtagaatatgatggcgaatggtatgtttataacgatgggaggcttgaataaatgaactggaaactgacgaagacacttttcattttcgtgtttattcttgtcaacatcgtattagtatcgatttatgttaataaagtcaatcgctcacacattaatgaagttgagagtaacaatgaagttaattttcaacaagaagaaatcaaagtaccggctagtattttaaataaatcagttaaaggcatacaattagaacaaattacggggcgttcaaaagactttagttctaaagctaagggcgattcggatttgaccacatcagatggtggaaaattattaaatgcaaacattagccaatcggtaaaggtcagtgacaataacttaaaagatttgaaagattatgttaacaaacgtgtgttcaaaggttcagaatatcaattaagtgagattagttctggttctgtaaaatacgaacaaacgtatgataatttcccgattttgaataatagtaaagcgatgttgaactttaatatagaagataataaagcgactagttataaacaatcaatgatggatgacattaagcccacagatggtgcagataagaagcatcaagtgattggtgtgagaaaagcaatcgaggcattatattataatcgttacttgaaaaaaggtgatgaagtcattaatgctagactcggttactactcagtcttgaacgaaacgaatgttcaattgttacaaccaaactgggaaattaaagtgaagcatgacggtaaggataaaacgaatacttactatgttgaagcgacaaataatagccctaaaattattaatcattaatatgaatcgtaataagctagcattgcaagctcatcatatgtgagaagcggtgctagctttttgctggtatggtttattatggctgacgtttttgcgtcctaacatgcgcatttattcatatattaagtagaaccgcattgtaaaattaacgtaactgctattttaaaaactttagtatttgtctaatcattgttataataattaggacattcattgcacgtgattatcaaaatttaattataagagaccggtcgatgaactaaagttacagaataggaaaggtatacaaaacagctaatatactgatagtttctgtagggaaaatcgtatatttgcactgatgtatattgcagtcatatagagagattgactgcttaaatagaaaggatgagccgcttgatacgcatgagtgtattagcaagtggtagtacaggtaacgccacttttgtagaaaatgaaaaaggtagtctattagttgatgttggtttgactggcaagaaaatggaagaattgtttagtcaaattgaccgtaatattcaagatttaaatggtattttagtaacccatgaacatattgatcatattaaaggattaggtgttttggcgcgtaaatatcaattgccaatttatgcgaatgaaaagacttggcaggcaattgaaaagaaagatagtcgcatccctatggatcagaaattcatttttaatccttatgaaacgaaatctattgcaggtttcgatgttgaatcgtttaacgtgtcacatgatgcgatagatccgcaattttatattttccataataactataagaagtttacgattttaacggatacgggttacgtgtctgatcgtatgaaaggtatgatacgtggcagcgatgcgtttatttttgaaagtaatcatgacgtcgatatgttgagaatgtgtcgttatccatggaagacgaaacaacgtattttaggcgatatgggtcatgtatctaatgaggatgcgggtcatgcgatgacagacgtgattacaggtaacacgaaacgtatttacctatcgcatttatcacaagataataacatgaaagatttggcgcgtatgagtgttggccaagtattgaacgaacacgatattgatacggaaaaagaagtattgctatgtgatacggataaagctattccaacgccaatatatacaatataaatgagagtcacccgataaagttccgcactgctgtgaaacgactttatcgggtgtttttttatgttgttggtgggaaatggctgttgttgagattaaggttctagttgaaacgcaaaaaataattcgatattaaatgtaatttataaataatttacataaaatcaatcattttaatataaggattatgataatatattggtgtatgacagttaatggagggaacgaaatgaaagctttattacttaaaacaagtgtatggctcgttttgctttttagtgcaatgggattatggcaagtctcgagcgcggctgagcaacatacaccaatgaaagcacatgcagtaacaacgatagacaaagcaacaacagataagcaacaagtaccgccaacaaaggaagcggctcatcattatggtgaagaagcggcaaccaacgtatcagcatcagcacagggaacagctgatgatacaaacaacaaagtaacatccaacgcaccatctaacaaaccatctacagcagtttcaacaacagtaaacgaaacgcgcgatgtagatacacaacaagcctcaacacaaaaaccaactcgcacagcaacattcaaattatcaaatgctaaaacagcatcactttcaccacgaatgtttgctaccaatgtaccacaaacaacaacacataaaatattacatacaaatgatatccatggccgactagccgaagaaaaagggcgtgtcatcggtatggctaaattaaaaacagtaaaagaacaagaaaagcctgatttaatgttagacgcaggagacgccttccaaggtttaccactttcaaaccagtctaaaggtgaagaaatggctaaagcgatgaatgcagtaggttatgatgctatggcagtcggtaaccacgaatttgactttggatacgaccagttgaaaaagttagagggtatgttagacttcccgatgttaagtactaacgtttataaagatggaaaacgcgcatttaaaccttcaacgattgtaacgaaaaatggtatttgttatggaattattggcgtaacgacaccagaaacaaagacgaaaacaaggcctgaaggcattaaaggtgttgaatttagagatccattacaaagtgtgacagcagaaatgatgcgtatttataaagacgtagatacatttgttgttatatctcatttaggtattgatccttcaacacaagaaacatggcgtggcgattacttagtgaaacaattaagtcaaaatccacaattgaagaaacgtattacagtcattgatggtcattcacataccgtacttcaaaatggtcaaatttataacaatgatgcattagcacaaacaggtacagcacttgcgaatatcggtaagattacatttaattaccgcaatggagaggtatcaaatattaaaccatcattgattaatgttaaagacgttgaaaatgtaacaccgaacaaagcattagctgaacaaattaatcaagctgatcaaacatttagagcacaaacagcagaggttattattccaaataatacgattgatttcaaaggagaaagagatgacgttagaacgcgtgaaacaaatttaggaaacgcgattgcagatgctatggaagcatatggcgttaagaatttctctaaaaagactgactttgccgtgacaaatggtggaggtattcgtgcctctatcgcaaaaggtaaggtgacacgctatgatttaatttcagtattaccatttggaaatacgattgcgcaaattgatgtaaaaggttcagacgtctggacggcttttgaacatagtttaggcgcaccaacaacacaaaaagatggtaagacagtattaacagcgaatggcggtttactacatatctctgattcaatccgtgtttactatgatatgaataaaccgtctggcaaacgaattaatgctattcaaattttaaataaagagacaggtaagtttgaaaatattgatttaaaacgtgtatatcacgtaacgatgaatgacttcacagcatcaggtggcgacggatatagtatgttcggtggccctagagaagaaggtatttcattagatcaagtactagcaagttatttaaaaacagctaacttagctaagtatgatacgacagaaccacaacgtatgttattaggtaaaccagcagtaagtgaacaaccagctaaaggacaacaaagtagcaaaggtagtgagtctggtaaagatgcacaaccaattggtaaagacaaagtgatggatccagcgaaacaaccagcgccaagtaaagttgtattgttgccagcgcatagaggaactgttagtagtggtagagaaggttctgatcgcgcattggaaggaactgctgtatcaagtaagagcgggaaacaattggctagcatgtcagcgcctaaaggtagcacacatgagaagcagttaccaaaaactggaactgatcaaagttcaagcccagcagcgatgtttgtattagtagcaggtataggtttaattgcgactgtacgacgtagaaaagctagctaaaatatattgaaaacaatactactgtatttcttaaacaagaggtacggtagtgtttttttatgaaaaaaagctataaccgttgataaatatgggatataaaaacggggataagtaataagacatcaaggtatttatccacagaaatggggatagttatccagaattgtgtacaatttaaagagaaatacccacaatgcccacagagttatccacaaatacacaggttatacactaaaaattgggcatgaatgtcagaaaaatatcaaaaactgcaaagaatattggtataataagagggaacagtgtgaacaagttaataacttgtggataactggaaagttgataacaatttggaggaccaaacgacatgaaaatcaccattttagctgtagggaaactaaaagagaaatattggaagcaagccatagcagaatatgaaaaacgtttaggcccatacaccaagatagacatcatagaagttccagacgaaaaagcaccagaaaatatgagcgacaaagaaattgagcaagtaaaagaaaaagaaggccaacgaatactagccaaaatcaaaccacaatcaacagtcattacattagaaatacaaggaaagatgctatcttccgaaggattggcccaagaattgaaccaacgcatgacccaagggcaaagcgactttgtattcgtcattggcggatcaaacggcctgcacaaggacgtcttacaacgcagtaactacgcactatcattcagcaaaatgacattcccacatcaaatgatgcgggttgtgttaattgaacaagtgtacagagcatttaagattatgcgtggagaagcgtatcataaataaaactaaaaattaggttgtgtataatttaaaaatttaatgagatgtggaggaattacatatatgaaatattggattataccttgcaatatcatacgatgtttatagagtgtttaataaaccatttttcaactattgatgatctagaatatataataactgtacaaattatattgattatggaactacaattaaattaagaaattgatgatgaaattttaaatttaaactaatggaatcaagaaagaatgaaaggaaatatacaatgcctacgattaataaaaggaagtttattagattttgtgttagaaacagtggatgtttttgtaaatggaagtaaaaatgattgtgaattagtaaattttaattataaagaaggaaaagtagtttcacgttatagtacaaaatttgaaagcaatcctaaattaagaaaagagcaattgatatcgacggtaaaagttgtaaggtatgttatttttgattttgagaaaattttatggggcatagggaaagttttattgaagttcatcatattaagacaatgtttactataagaaagttgaaataaactcagaaacagacttgattcccgtttattcaaattggcgcaaaatgatacatataaacacctatatattgaagatttaagtcaaacggtaaataatatttttcacttttaaacagaaacttttttggaaattatattaattagtataaaaatgaatatgttcacaaagaaggagagattttattgaaacacattaatcatttttctgaatcgacgctagcatacttggaaaaagaccatgaacatgcattttatgtatattgtttaatagacccaagaaatgatgaatgcttttatgttggtaaaggtaaggggaatagaatatttaaacataaacaagatgcgcagagacaattattgtacgaagatatattcagagaagaaaataaagataacttgaaatttaatagaattaacgaaatttgtagcaatgatttgaatgttttaggatatataatcagttatggattaaccgaatctgaagcattttctgcagaaaatgttcttataaactttcttaacctaacaaataaaactacattaacaaatatgattaacggtcatggatctaaggcatacttagttgaagatttagaaaatgaatttggctacgattcaattaatcttgaaaacataaatacgaatgaattaattttagcagtgaaaatcagagatgcatttctattagataaggatgaaagtaaagagtatcctattaatgaaagtaaacgtgatagaaataaccttaaatcgcgtacattaggtagttggataataggaaaagataaaatacataaaataaaatatattattggtatcaatacaggtgctaataatgcagttgtctcagcttatgaagtatcatttgaacaagcggagagtatcgaaacaaataatggtagaatgagatatgcgtttattgggctttcagaaagagatgctactctaaaaaaattgaatttatacaaaaaagcactaccagatttaagatttggtagtggtagcgctacagcatatataaataatgggacaatgaaagttgattaaatgaataaaaacatccaattccttaaattagcctttgaaaattttatactcgtatatataagtgaaaaacttaaaagaattagatgttaattaaaggagagaatgctatgccatcagatgatattgtaaaaaaactatactcaaaagaggatattcgattagaattaggacttactccgcataagtttaataaaaaaatggaaactattgctaagctttttaaaattgatatgaaaatttttcacaattacaaaggccaagataaaaataatcagtatacatttaatggtgtcgcaaaagaattaatcaaagtgttgctaaaaagtgttgattattacccagtggatatcaattccaaaaaatttaaacaaaatggaaaatctaaaaaagaaatgattgaaaatatagataactctagttacatgaaatatatttatcagttaatgaaatctatcaatgaaattcaatacaaaaggttaattgctgatatacatatgaaagatgtgtaccagaatacaaaagcatggttaaataatggtgaatcaattaataaaaaagaacaagagctataccaatatatgacaattttaccattacataaaagagttgaactgcaaaatgaggtattaaaatctatagacgaaacaatttttcaatttctcgcaaaagaacatagaaataatcaaattgaagaaaataatgaattagaagcatatacaaaagcaataaaagaaggtagaaatcctaaaaatgattatgaattaaatcatctcctatataaaaaaaatcaattacccttagatagtctaatagaagatatatgggactatgaggaaacagagtatactgagcttgattggttaattgcagatatgctaaaacgttcacaaagagctgatagtaattttatcgaaagtttagagaagaaaaacaaattgagaaaaaatattcataaagattccattaaaagtatatctaagttgattgatcatgaattagttaaaaataatagaaagtgggacgtagcagaattttataaaaatcaacaattttggaataatagtacattaagacgtagctctcaaaattttggaattttatattacaaaaagaataggttacatacaatgaatcaaagtaatattattaagaaaataaaaattatcgaagctaatatagagagtgcaaataaacagccgagctatttagatttctttttacaagctaaatttgatttagagaggttagaaagtgaattaatgaaatatagcattaatccgaaatattttaataagataaatagtgattacgtaagatatgctattgaagatgtacataatgcaattattaaaattgacagatatataagtaacgataaagtgaagttaaactattcaaatgtccaaatggtagtgagaaacgaaataacagaacaaggaagctactttgtaacccaggcattgaatacactgtcaaaggtagaagagtctggctacagctttgataatttcatggtaggacctttcgtagaagactttaaaaaagcaattaaaaatcgtagatttggttctaaaaaagattaagattgttttttagagttaaacataagaataaatttaaataaaaaaataaacccaacaaacctcgttatatcaatgtttgttgggtttatttttttggtgattttttaataactcaattacatcttaggataatatcgctaaattatacattgtcgaggccaagacaaataaaaaattaaagcaaaagttagcgcgcaactttctgctataaaggagcaaatttatatggagacaagagacaaactgatgtcattgactcaaagtgacaaaacacagcaatggctaatggacaagtcatctaaccaagatgacattcaacaattgcagcaacaattcagtcagcagcttgatcaacaatataatgcacttttagctgatgaaaaagctaagttagaccaatacgtggaagtacatcaaggattggaatcattaaaggaagagattgaatcagaacctattacgcttaatatcgataaattacccgatatcaaagcaacaatgcttgaaagagccaagaatgatgaacattctgataaaatcgaaaagctatttgataggttagaacaggcattaaatggtacgaatcgattatatacgcaattatcgttgattggtacacgaacacatcgaattacaactaaaaattttaatcttcaaggcttacctaaagcagtccaacatacgattttaccttcaaaatttaagaaggtgtatacagtcgattttaaatcgtttgaaccatcagttgcagcgtacatgactcaagattcaaaactgattgacttgttaaatcagaaagacggactgtatgacgcattgctaagtgaattaggcttatcagatgagctacgtgtatttgttaaacgtgcatttattggttcgtttctatttggaggtaacttcaaaaatcctaaattcaagctgaatcaatatgtaagtgaagtacaatggttggatgcggtcagccaatttacaaaagtcattgaacttaagaagcacgttgaaaagagtaattccatgcctatgccttatagtattgagcatgatatgagcgcatttcaaggtagcagtattatggcaatctacgtacaaactgtagcgagttatattttcaagcacattctgctaaaagtgtacaaagcacagtgcgatcaaaaaacgttcaagattatagtacctatacacgatgcgattatgattgaatgtgaagatgaagaaattgcacaaaatgtgggtcagttaatgaaagatacggctaaccagttgttcaatggtgaatttgcacatgtgacagtggaagaaataggaggcgtagaccatgaataatgatagaggacaaagcctacacatcccaagtagtacaccaatcaaagaaaataatatatatgtagctacgttacattctgtgatccaaacagatttctcaggtgaaataaagcaccaattcacgtatgaaattgaagtgaacaatcagattgtatatgcgaatcgtaatattccaacaaaaccgagcgctaatcagttgtcaattcatgattggctgaaacgtcatagcaactatagcgtgggtcatgatacgtatgaaccttatattgaccgtaagcatttaatccatattggtcaatatagcggtaactattatgtacaagatgtagcatcgttagatgcgtttggaggcgtattatcatgaatcatatattacaaatgttatctaagctattaagtgtggccaaggaggcaatcgaccgtcaaggtctgattgctatcctaactattcctgttaataataacgatgaaatagaagaaacggctcaaggtgaaaccgtgtataacgaacttatcgatcagttacgacttaatatcccaaaagatacggattatcaacctaacatctatagttattttggtattaagaagaatcctaatgacaccgtactcatggaaatgatgataaaggtttttcatatcaaacgctttaattcagaactgtttattttcaaagttaacgggtggcaaaagataaatggagatgaattacaagggttgatatctaaaatgatacaagtattgcttgtagattataagccttcactaagcactctaaaaaatgtcgtagatggattgcaaaaatcaacagatgtagaagaacttgttgagaatgagcgctatattggttgtggtgaaaatatgttcgatcttaatacgtttcaagtcgttaaaaattcaatcgatatctttccaaaaacacgattgaatttatcattaagtacaaatgatgtaattactgataagataccgccttattttaagcaatatatgttacaacttgcgaattatgacgatgatttacaatactttcttttccaacatacagcagtattacttacagctgatactaaataccgtaggggtctcatattatatggtggagctaagaatggtaaatctgtatatattgaactagttaaatcatttttctatagtaaagatattgtgtctaagccacttaatgagcttgaaggtcgttttgacaaagaaagtttaattgacaaaagtctaatggcaagtcatgaaattgggcaatctaggattcaagaaaagatcgtaaatgacttcaaaaagttattatctgtagaatcaatgcatgttgatcgtaaaggaaaaactcaagtggaagtcattttggatttgaaacttatttttagtacaaatgcgatacttaattttcctcctgaacatgcgaaagctttggagcgtcgaattaatattattccatgtgagtattatgttgaaaaagcggacacttcattaattgataagctccagagtgagaagaaagaaatctttctttacttgatgtatgtgtatcaacagattgtaaaagcagatatcgagtatcttgaaaatagccgtgtcactgaaattactcacgattggttaaattttggatatgaatttgtttctagcaggtccgtaagtaatgcaaatcagaaagcatgtattaatttactcagaaaacttatagaaatcaaatcaggatcacgaatcaaagtatccgagttaaataaagttattaatgaagaaataaaggtgagttctcaggttattaatcagttaattcaagcaaactttgatactcaaaccaaactatacaatggctacgattattggattgatttaggttggaaagaagccaataaaaaagagattcatgatatttcggaaaaagataatattatttcattagataaaaatgaaaatataacagacgatgaggcattagatgaagagaatttggactttgattgggaggactttgacgatgaataatgaacaaattgaagcatttgtagaagtgcttgtgcctatcatagaagaacgtatcaataaaggtaagtaatctaattacgtactacaggcaactgcctgtagtactcatataattaagtggtaaaagtgataaaaatgaaacgaaattataaatatatattatctatatgttgttacaagaccgatagtctgtagcaataatctaataaaaggagcggtatgaaatgaagggtaaaattgcactttattcacgtgttagtacgtctgagcagtcagaacatggttattctgtaaaagagcaggaacaagtactcatcaaagaagttgtgaaaaatttcccaggttatgactatgagacatatactgactcaggcatttcaggtaaaaatattgaaggtcgtccggcaatgaaacgtctattacaagatgttaaggataataaaatcgaaatggtgttaagttggaaattgaatcgtatctcacgatcaatgagagacgtgtttaatattattcatgaattcaaagaacatgatgtagggtataaatcgatttctgagaatattgatacatccaatgcttctggagaagtactcgttacaatgtttgggttaataggatctatagaacgccagactttgatttcgaatgtgaaactttctatgaatgctaaggcaaggagcggagaggcaatcaccggtcgtgttttaggctacaaattatcacttaatccacttacacagaaaaatgatttagttattaatgaaaatgaagctcatattgtacgggaaatctttgatttatatttgaatcacaataaaggacttaaagcaatcacgacaattctaaatcaaaaaggatatcgcaccattaatcaaaaaccattttcagtgtttggcgtgaaatatattttgaataatccagtctataaaggctatgtcagattcaataaccatcaaaattgggctgttcagcgaagaagtggtaaaagtgataaaaatgatgtgatattggtcaaaggtaagcatgaagccattataagtgaagatgtatttgatcaagttcatgagaaactagcttctaaaagttttaaaccgggtcgacctattggtggagatttctacttacgtggccttattaaatgcccagaatgcggaaataatatggtatgtcgacggacgtattataaaacgaaaaagtccaaagaacgaacaatcaagcgttattacatttgttccttattcaatcgttcagggagttctgcatgtcacagtaattccatcaatgctgaagtcgtcgaacgcgtaatcaatgttcatttgaatcgtattctttcacaacctaatgttattaagcagattgcgtcaagtgtgatagaagaactgaaacaaaagcatagtaaacaaacagaaataaaatatgatattgatagtctagacaaacaaaaagcaaaagttaaaacacaacaagaacgattattggaattgtttttagatgatgaaatggatagcgaaatgttaaaagctaaacaaagtaaaatgaatcaacagttagaagtattagaccaacaaattaaagaagcaaaacaagcaaatcaatcacaggatgatatacccaattttgataagttaaaagcacgactcattttgatgataacacgattcagcgtgtacttaagaaaggctacacccgaagctaaaaatcaacttatgaaaatgttaattgattcaattgaaattacgacagataaacaagtaaaacttgtaaggtataaaattgatgaaagtcttatccctcaatctttgaaaaaagattgggggtctttttttatgcctaaatttaactttgtgataaatgtcacaaatgaaaataggattgaaaatttatcacttttaccacttttttagagtgacaaaagtggagggattttgaaatattttataaatatatattttatttatggagtacacattattaattaaggaggtcattataatgacgctaagcaaacaacttaaaacgtatattactgaacgatttaaattaaattatcaagaaacttgggctcgtgaaaccgtagatgcggtggctgaagatgtattacctgaaaaatatattaaaaatagtccacttgaaaataaaattttaaatacttttacctattacaatgatgaattacatgaaatcagcatttacccttttttatgttatctagataaagaattagtagcaataggttatttagataattttgatttagactttatatttttaaatgacactcatcaagtcattattgatgaacgctacttgttacaaaaagggggtgagtaattatgaattggattaaggtcgctcaactatctgtcacagttatcaatgaagtcattgagattatgaaagaaaaacaaaatggaggggaatagtatgcaaatcaatcgatacattacacgaggcattagtgaacacctatctctagaccttcaaatcttactttggaatatggtaaaagaaagagataatcaacctgatacagattacctacacatttttagactgcaagaagatgagaatatactctcaatcacacatgaacaagaacaacctgcatacaaattggaatatcactatacaaactatgaaaaaaatcaaaacgcattacctaagaaagtctacgtcattcgagaagatgatgtagacctttcttattatgtcatgttactaccagaagaatactagaggagtgaaaattacgtgaaaacaatcgaaagtacattagaaaccgaagctatattcagtgatgaccaacaacatcgctatctacttaagaaaacatgggacagtgaaaaacaaaagatcacaatcatcacaatgtatccaaattatacgggccttcttcgtatagatttaactacccaattgataatgaacaaagtttcagaaatggatgcatttggttccatcaattttgtgaatctatactctaatattacaactcctatcaatctcaaacatttagaaaacgcctatgataatcatacagatattcaaattatgaaagccgtgaaagagtcagatgaagtgatactagcttggggtgcttacgctaaaaagcccgttgttgaatcacgcgtcaatgaagtattagagatgttgaaaccacataagaaaaaagtgaaacgactcatgaaccccgcaaccaatgaaatcatgcatccccttaatccgaaagcgagacagaaatggactttgaaagcataacctatatatggaggtaaacgatgaaggaaatcaatattgtttcactacaaatgataaaaacagacacattaagttatctaaaaaatcgtatttcaaaccctgaggatgcggcagaaatcttgcgttcattcattggaaacagtgaccgagaacatctcattctcatatgtatgaatagtaaaaatgaacctacacacattcaaatactatcgattggatctattaaccaaacagtgattcatcccagagaaatattcaaaacagcaatactcagtaacgccaacagtattatgctcggtcataatcatccaagtggggatatattaaccatagtataataaataatagtagttaaagtagtttaagaggagatattaaagggatattttactttaaataaaaattaacaaggtttataatttgtagtagttaaagtatttaaagaggtgggaacatgtgaaggttcaaaggatagaagtggagaataagccgtatccattgtatttattactagataaagaataccagctaatagaaccagtaatgaaatttattaaatacttagataatactggtaagtctcctaataccattaaggcatactgctatcatttaaagttgctgtacgagttcatggaacagagaggtgttattcttaatgatattaactttgagttgttagcagacttcgtaggttggttgagatatccttcagcatcaaatgtaattgatcttcagtcaaaaaaagccataagagaagaaacgacagtgaatacaattttaaatgtagttatgagttttcttgattatttaagtagattaggagaatttaaatcaattgatgtatttaaacaagcaaagggaagaaatttcaaaggatttttacatcatgttaataagggtagataccaaaagaatgtcttaaagttaagggttaaaaagaaacagataagaacattgagatcaaaggaagttaagcaaattattgatgcttgtcatacgaaaagagataaattaattttaatgcttatgtatgagggtggtttaagaatcggtgaagtgttatcgcttaggcttgaagatattgtcacttgggacaatcaaatccatttaacacctagagatgttaatgttaatgaagcttatattaaattaaggaaggaaagaacaatacatgtgagtaaagaacttatgtcactttatacagattacttgatatatgagtatagtgaggaattggagcatgattatgtttttatttccttaaaagaaggctattttgggaaaccactaaagtaccaaagtgttcttgatctagttagaagaatagttaaaaggactggaatagaatttacatcacatatgcttcgccacactcacgcaacgcagctaattagggaaggatgggatgttgcgttcgttcaaaagagattaggtcacgcacatgttcagacaacgttaaatacctatgttcatctttcagatcaggatatgaaaaatgagtttaataaatacctcgagagaaaggagcataagaaatgaatgcttctagtaaaaggaaaattattagtcagagtgagattagcaaaaaaatagctgtaatgaatgaagaaatgcaagggttttgggctaataatagttgggatataagaaaatgtccacatccttctgccatagaattaagtaagaatcctgctttaagaaatcgttgggttcgttttgaacgtgttaaaaatctgtggttaagaacagaattgaaatatttttatttttaccatttaaacaatggaatatggaatgcaaaaactgtctggattagaaaaggaacagtaattaataaaatgttggattttttagatttaaagtatcccagcattacttcaattactgaagttcctattgataaagcaatgacggagtatagaacatatttgacaaaacagggtgttagaattaccaccactaattataagattactgctaatcaagaaaaaacacctgtaaaagctaattcttactatgttactaatcttaaacaatttattgagttttatgaggatttttattttgatggagaggagtgggataaagacgtttgggatagacgaaacttacctttgccagatgataaggttaacccaacacaatatgaatatacaattaactttaaagggtttcggaatacatattttaaacagcttgtaaaaagatattgtaagttaagattgaacatggatagcttttcctatgtaagtgatattgcccaaaaacttaaagagttctttaattttctggacataaagtttaaacacgttcagagagtacaccaattaacgagagtggaaattgaagcatatttaagtgaactaaacatgatggggataaaacctagtacaataactgggaggatctctatattggaaggactatttagtacccttcataggctagaatgggatgatgttccttccaaattattaatttatcccgaggactatccgaaaataccaagagcaaaacctcgctttatagacgaattcgttctagagcaattgaacagtcatcttgataaattacccgaatatatagctacgatgactatgattgttcaagaatgtggaatgaggataagtgaattgtgcaccttgaaaaaaggctgtttattagaggacaaagatggagattacttttaaagtattatcaatggaaaatgaaaaaggagcatatagttccaatatctaaagaggtagttttacttattaaagttcgggaagataaagtttcagaggaatttccagatagtgaatacctctttccaagaaaagatggatcgccattaaaacaagaaacatttagaggcgaattaaataaattagcttatgagcaaaatatagtggataaattaggcgagatttatagattccatgcccatgcctttcgccattcagtaggaacaagaatgattaacaacgggatgccccagcatattgtgcagaaatttttggggcatgaaagcccagaaatgacaagcagatacgctcatatccttgatgaaactctaaaaaatgaatttactaaatttcaggaaaaactggttaccaataatggagatgtgcttgatctagatgaagataatgaagtcgatgatgtagagcttcaatggttcaagaaaaatataaatgcacaagtgcttccaaatggttattgtagattgccagtagtagcaggtggttgtccacatgcgaatgcatgcttagattgcactcacttctgtaccagtaagcaattcttaccacagcacgaagaacagttagagcgtacagaagagttattagccatagctaaggataaacaatggcaaagacaagtagagactaatagccgtgttaaagagcgtttagaacaaatcattggaagtttgacggggtaattatcaatggataaacaagttagaaatacaacagaaattgtacgtttggcgaagcagaaatcaaaaaagacaagggaaaaagtagacaaagcgatttctaaattttcgattgaaggtaaagttattaattttaattcaatagcaaaggaagctaatgtttctaaatcatggctttataaggaacacgatattaggcaaagaatcgaatcccttcgtgagcgtcaaataacagcaaatgtagtctcaaaacccaagaaaagttctcgttcggaggaaatccttattaaaaccttaaaaagaagagtaatggaattagaaaaagaaaataaaaaattacagaaccaaattcaaaaattatatggagatctgtataataaagaataattattaatctgtagacaaattgtgaaaggatgtacttaaacgctaacggtcagctttattgaacagtaatttaagtatatgtccaatctagggtaagtaaattgagtatcaatataaactttatatgaacataatcaacgaggtgaaatcatgagcaatttgattaacggaaaaataccaaatcaagcgattcaaacattaaaaatcgtaaaagatttatttggaagttcaatagttggagtatatctatttggttcagcagtaaatggtggtttacgcattaacagcgatgtagatgttctagtcgtcgtgaatcatagtttacctcaattaactcgaaaaaaactaacagaaagactaatgactatatcaggaaagattggaaatacggattctgttagaccacttgaagttacggttataaataggagtgaagttgtcccttggtaatatcctccaaaaagagaatttatatacggtgagtggctcaggggtgaatttgagaatggacaaattcaggaaccaagctatgatcctgatttggctattgttttagcacaagcaagaaagaatagtatttctctatttggtcctgattcttcaagtatacttgtctccgtacctttgacagatattcgaagagcaattaaggattctttgccagaactaattgaggggataaaaggtgatgagcgtaatgtaattttaaccctagctcgaatgtggcaaacagtgactactggtgaaattacctcgaaagatgtcgctgcagaatgggctatacctcttttacctaaagagcatgtaactttactggatatagctagaaaaggctatcggggagagtgtgatgataagtgggaaggactatattcaaaggtgaaagcactcgttaagtatatgaaaaattctatagaaacttctctcaattaggctaattttattgcaataacaggtgcttacttttaaaactactgatttattgataaatattgaacaatttttgggaagaataaagcgtcctcttgtgaaattagagaacgctttattactttaatttagtgaaacaatttgtaactattgaaaatagaaagaaattgttccttcgatagtttattaatattagtgacatttgcatgcttcaaagcctgtcggaattggtttttagtgaaaagaacacgatattcacggtttacccacttataaacaaaagatcgatactttttgtagtccttctttgaaatcaatggttgatgtcgttcaagaacaatcaatacagagtctacacttggcttaggatgaaaatatagtggtggtacttttttgagcatttttatatccatctccaccattaatagtaaacccaaagctcgttgcagattttgcaatcttttcgcaaatcccttctcaacgataagatagctatatttagcctgactttcaaaggtaattcttttgacaatatccgtactgatgttataaggaatattaccatatatcttatagtttatatgttttgggaaggaaaattttagaatatccgtttgaatcacttttatattctcagaggggtttaccgcttctttagtcacttgacataagcctccatcaatttctatagcagtaactgatcgactcattttgactagctctttggtaaaatgtccttttcctgatccgatttctattacgttgtcttgtttactgatattcgtgtgattcaatatttcttttacatgctttttagaagtaataaaattttgcgtgtctttagggtttttctggttcattataaccttctccttactggttcattataaccttctccttactggttataatgaactgacattaagcgttcattataaccaattaattttgatttggttgataacgaactttattaataacaaatatagaaaaagtacccatacttttatctcctttccatttttttcattatgaatgagataaagtaatttctactactgcgatactggtgcacataattgaaacctccttatgtaactgaatatgattgtatcatcttttcattttagaataaacctttatatgtaattttgcacttgacacttcagatggacgttttcttcaaaataatatgttttgaaacttgataagagaagccactgtctttactaaaaagtaaaggctgcgataaaggacagtgactttaataaagttgcactgttgtattgtctttggataaaattgtctaaagggaagttttatccccaacgaaaaaacatctaaagtggtaagtaatgaaagaatgtcgataaagtaggaatgggggatctttttgaatacaatagaatcacagtttgataaggttgcagaagattacgatttcgtgaatgagcttttgaatgattattcattctttgtgtctaatatgtctccaaagaaaggcagagcattagatatcggatgtggctcgggtttgttagtggagaaattagcaagttattatgatgaagtggtagggattgatatttctaatcaaatgctcgatcttgccaaatctaaacgtcaactaacaaatacggtctatctgaatatgaatgcagaacaacttaattttaatgagaagtttgattttattgtaagccgaacaacctttcatcatttggatgatatagccagcgtaatacagcaaatgaaggaactgttgaatgaggaaggaagaatagttattcttgataatgtatctgaagtcgagacaccgcctacctatgtttataaattaggggcaatccaagagtttttaccgcattgtttcaaatttggaataaaaaatgcgattagaatttataatcacaacacatctaaatcatggcttgagcatttagcttcagataagtacctatctgaacaaaattattacgatttatatgaaaagttgttgcctggatgccaattccataaaatgggttgggcaatgggggttgtctggacaaaataacttaaagctgtggctttgaaaagttgaatttgtgattgttttcagagctatcgggtgctttagtataaataacaatgaataaaaaatcagcctgtatcttatgttactattaagtaatttaagatacaggttttactatttttgaaataagtaccttccacttcaaatacatgtattcaaagtgaaagtattgatttaaatgattcttttgtaatttactcttgataaagtttaaccccctctcctgaagatatcaatgtaaccgaacggttaatgctcatcagtgaaatgatgggcattttattttatgatcatattattttttcagatagtaacacctattccattagacaacatgatttagaagtagaggtatagccgtattttgtcactaccgttatttcttcacttatcaatatttataaaatccctttataacaacattttcaactgaaaaatattttttacaacttttattaaatatacgtaggattgacttattgtgacaaacctattttgtaatatataacttaaaggaggtgacatattggatcgtgcatttcgaatacttacgatatacaatcgtttactacaaaataaatccgtcaacaagcaatcactcacattagaactcgatacaagtcctcggacgatacaaagagatatcgacgatataagaaacttcttatatgaaagtaaatcatggataagtacacctaaagaaatcacgtacgattataaatctgaaagttataagctcgaacaagataagagtaaaaatgtgcattttatgtataatattttgactgctttatacctgacgacacctaaattaagtcattacttttatcaatatcttaaattattaatcataaaacatcattcaaatcatcgaactacattattaaaatatcttgagcgctttgaaattgataagaatcaaacaggtatttcgacatcatcattagttgttcaagcaatgaacgaaaataaatatcttcaatacaatcaaaaaatattattacctttatcgatgtactatcaaatgcatgcttttcacttggtatatcgaatgaacgatgaaatttatatcgatgatattaatcaaatgaatctgagtttctctgaaaaatctgtggacacacatgaaaaagcaaaggtacaaacctatatcacgtttgaaatttctaaagatgtgtggtcaaaaatgcatcgatattatcaaattcatgtgatagaaaaatatgatgcgcattatcttatcgtcacttttaagatgacaaggatcgaagcgattcaactctgttttatgtatcgatccaatatacgtatcatttcaccccctgatttgaaggaacaagtgattgatgaattacttttattacaaacaacctatttaaaacaacaggttcaaaagtagaaataacatacaatatttaataaataacattaataataatgaaaggaatgggaattatgagtaacatcataaaaacaataggcaaaggtattggaaaaggtgtcggtgcagcagcatattattcagttgcaactgttggcgcagctatcggtgcgatttgggaaacaacaggcgatagaggtttaatgagagatgctttaagtgatagttctaatcaagatttgatggaaatatatgagatacaaaagaaagatgatggggattatgatacttatattgcagctaaatctttattacaagagagaggattcacttataatcacgaaacgaacaagtgggaaaaatagtaaggagtgaaataaatggaatttacatattatgaaacgaaatctttaaatgattttgaaaatgaactgaaaacacttgctttaaataaaaaatatacattcagtaaggaaaccggagtccttaaagaagatgaaatccttgaaaaatcgaatagccatgagcgcgaactattaaaagtatttaaagataatgcacagataacaacttatcattttaagagtcataaaagtaattatttaattattatgggagaaacaaaagcgcctaatattattggattaacagtcatatttaacaaaaaaccttttaaacaaatgggcaaaattgcattaggatggctaattgctttgacttcaggtggaagtatattagccattggagcagtatttggaatacttacctcagttgcaagacgtacacttgtaatcaaaggaccattaggaaaagaaatttcacaaattatagaaaatgaattaggagaaccgatagaaattaaaaaataatagaaagtaactattttcaaagacacattgatttcaaaatgtgttctttttcaattattttagaataaatatagaaaagcgtagcaaaatagattaatataaaattaaaataaatatagaatggggttagcaatgtgaagaaaatttttgcaagcttaggtgttattttattagttgcaatattgggagttgctgttgtatttgcatatgggagttacaaagatttagaactaaaaaaagaagaagctaaactagaggataagaagaataagaaaatcgataaaaacaaaactacagaaaatgaaaatcaagaccagattaataatcaaacaattacagcaccaaatgaaaaagcacaatatggcaataacctaggagttcaagaaaaaagtacggataaaaatgatcctaatggtgtgcttagatttgatacaaacggagatggatttatctccactagtgaagtaacaccagaagctcaaaaattagttgatgaaggtaaactacagccatcttcagatagaatggttgaagagtggactaagaataaaaataatgtagataatacatatgactatgatgaatcatataaaaaacaacaagaaatgtacaaaaaagctgctcgtggcgaagttcctgaacctggagaaacaataaaataaaaaagcactagctacaattgcgataattataatttttggcatattagcacctgttgtttttttgttacaacaaatatcaagaagtagaattagaaaaaataaattacaggctaagcaaaaagaaaacgaagaaagtaattctcaaactactagtgaaacatctaataatgaaaatcaatcgaatcaaagtcaaaagaatagtcaagatcaagctacaacagaagaaaatacaaatgatgaacaacaagtgactagagataatatgtttgattacgctattgctgctgtaaatgaagtaggggatgctgatttattaaaattccaagaaccggaatacaatgggtcagaatggacaattaatgcaaataataaatcaggtgctggagctaacaccatcgtagttaaagatgatggaacagttcaaatatggaatggacctaaaacatctatgaatcatgaaactaaaattgaattatagtgaaagcgattaacaagctctacatcacctttacgagtgatgtagagctctcttatcatatcaagttactttgccatgaatactagtcgggtgaaaaattatatgtaacattcaaagcgtattatgaaaataaatgatattcattcatcaccaataaccacaacgcttacttaaaacaagatggaaccatgaaaaataatttaccacagttattattatgtaaatgcattacgaagagatccttactctaagcttaacgacacaattaattatgaacaaaattcagaaatggatgaatttgaattaatctatattctgatttcaccctacttattaatcaccaaaattttgaaaccgcataaacaaaaagttaactggctcattaaaccagcaaccaataaaattatgcatccactcaaccctaaagcacgtcaaaaatggacattaaactaaaggagaattatctatgaaccaagattcaattcaatcagattggcaaacagttgctaagtgcttagcgtcacaaaactatatttcaattgtgaaaggtttagttcatcatttcacaaacatcgatgatgaggaaatacttgataaaacctatgacgattttatgaatgatgactctataacaacggtacttaataatgattttcaagatattatcaatcgctacttatcaaaataaaatgtatataatagtaaaaccagagcatcccttcacttttatagtgagggatgctctctatttaatttttttgctatttaccattatatatatttaattttatttaaaatgtattgtataatttaaaataatggagtgacatttaatttaaaaaaatatataattagtttagtacttttaacttcttttttactatccgcttgtacaattaatattgagcgggatgaggaaaatagtgagaaaaataaacagaaagaaaacactcatactgattcaaacaatacaagttcgaatgaatcagatacttctaaacaatcatctcaagaaaatactataaatcaaacagaacaaaatcaaccagctaataataattcaagttcacaacaaaatccgcaaataataacagaaaatgaagctattcaaaaggtaaaagatgagtttccatctacacgaacaggaaatgactatcgtatagatactactagaactgataataatgtgtacgctatcaaatttacttctcaagatgcagaaggttatcctatgcaagctgctgttattattgataagcgaacaggagaatttattgattatattgatgatagaagcgatgaagataaagagcgtcatgtccaacatgctaaagaaagtactctttataaaggtccatacgatgctttcagaaaagattttagtcataaaataaatgaatgaagtatatatatgaattatcatctttaatataagagcatccctcactgcaaagtgaaggatgctcttttagtttatttttttactgattactcgccataagttctgcttgctctacaacctgctctacagccattttttgtaaatctggtggatagccatattttttaagcaatcgtctaacagctacgcgcattttagcttttgcgctatcgcgtttagaccaatcaacacccatgttttctttcactgttttagttagctcatgagcaatcgcacgtagttctttatctcccatggcttcttttgctgtttcatgtgaagctaaagcatcgtaaaacgcaatctcatctgaattcaggcctaattcatttcctcgttgttgttcttgtttaatatctttagcgagttgaatgagttcttcaatcacttttgatgtttcaatagaacggctattatatttattaatcgaatttcctaacatttcagagaaacgcttagatactgtcgcgttcgttttcattaatgattttacttgccctttgagtaatcgatttaataattctaccgcaacatttttttgtttcaatccttcgacatcttttaggaagtcatctgataggattgataaatcgggttgttcaagacctagtgtttggtaaacatcaatcacatcttctgtcacaacagattgtgacacaagttgattaatctctgcttcaacttctgcaggtgttttacgtgtttttccttcttttggcggttgtaacaatttaacaagtcctgctttaactgctttaaagaaggcaatttcatcattgagttcttgggctgtaggttcagtcgcacaaagcgcaaaagctttccctaactctgtgaccgttttaataaaacgctggcgttcatcttcgcctaaaccaatcacataatccatcgtatctgaaatcgcataataacgttcagactttttctctgaattaaacttagaatagtcaagattatataacatatcttgaatcacatcatatttcaataacatcaattcaaccgctttatctgtatctatcgccgtttgtgcttgatcagattctgtatattctttaagtgcctcttttaaactttcagcgatacccacataatcgacaatcaatccacccggtttatctttaaacactcgattgacacgagcaatcgcttgcattaaattatgacctttcatcggtttatcgatatacatggtatgcatggaaggtacatcaaatcctgtgagccacatatctcgaacaatcacgagttgtaattcatcattcatatctttcatacgtttttctaataaattacgacgttttttaggaccaatatgtctttggaaagaagttgggtcactagatgagccagtcatcaccactttaatgacccctttatcatcatcatctgaatgccattctggttttagacgaatgatttcatcgtataaatcaacagcaattcgacgactcatcgttacgatcattcctttacctttcatcgcttgctgacgtgtttcaaaatgttggatgatgtctttggctaaagcttctacacgaggttttgcgcctgctaaggcttcaattcgtgaccattttgattttaaacgctgttttacatcctcttcttgatcctctgtaatgtcattatatgcttcgtctaagtctaaattttgaggtaaatttaatggaattatgcgactttcatagtaaattttcaccgtacttccatcagctacggcttgtgtcatatcataaacatcgatatagttcccaaagaccatttgcgtatttttatccgttgaagctacgggcgtgcccgtaaatcctacaaacgtcgcattcggtaaagcatctcttaaatacttcgcataaccatatttaatgccttcccctttatcatcgtattttgcattaaaaccatattgtgtacgatgcgcttcatctgccataacaatcacatttttacgttctgttagagcagacatggtcgtttcgttttgttcaggttcaaatttttgcatcgttgtaaatacaataccgcccgactcaacagataataacgattttaattctttacgtgtttcagcttgttttggtgtttgtcttaataaacctttaccagaccgtcctttcgatttaacaaacgtactgtatagttggttatctaaatcattacgatctgttacgacaactaaggtaggattattaagcatttgaattaattttccagagaaaaagaccatggttaaacttttaccagacccttgagggttctgttgcaaagtaaaaaaatatagctaaccactaatttatcatgtcagtgttcgcttaacttgctagcatgatgctaatttcgtggcatggcgaaaatccgtagatctgaagagacctgcggttctttttatatagagcgtaaatacattcaataccttttaaagtattctttgctgtattgatactttgataccttgtctttcttactttaatatgacggtgatcttgctcaatgaggttattcagatatttcgatgtacaatgacagtcaggtttaagtttaaaagctttaattactttagccattgctaccttcgttgaaggtgcctgatctgtaattaccttttgaggtttaccaaattgtttaatgagacgtttgataaacgcatatgctgaatgattatctcgttgcttacgcaaccaaatatctaatgtatgtccctctgcatcaatggcacgatataaatagctccattttccttttattttgatgtacgtctcatcaatacgccatttgtaataagcttttttatgctttttcttccaaattcgatataaaattggtgcatattcttgaacccaacggtagaccgttgaatgatgaacgtttacaccacgttcccttaatatttcagatatatcacgataactcaatgcatatcttagatagtagccaacggctacagtgataacatccttgttaaattgtttatatctgaaatagttcatacagaaggctcctttttgttaaaattatactataaattcaactttgcaacagaaccatttgcgatacaacgaggcgacattagccgttaatttgcttaactgtagaagatttaaaagaaccccttgccatatatttaacaatgttgtccgggataacaacacagtgaatccaccgtttagttaagatgatggattttttcaaactgtggatgaggtacagagtttcattagataaaaacagggaaaacttattaaagagtgatttctgtgaggaggataatgatgacaaagaaatacgatcttattgtgattggtacaggttctgcggggtcaatcacagcagcaaaatgtaataaagccggctggaatgtagctatggtagatgacaggccgtttggaggcacgtgtgcactacgtggatgtgacccaaaaaaggttctacatggtgctgccgagcttattgattggaacaaacggatggttaagaatggagtaccgtctgaagtctccatcaactggaaagatcttatgaattttaaaagaacctttacagatgatgtcccggaaaaaaaagaggaagcattgaataaacagggaatcgatacgtatcatggcaatgcatctttcgtgagtgaggacaaacttgaagtgaataaagaagtgctcgaggggagtcatttcttgatcgctagtggtgcgaaacctacccctttacccataaaaggagaagaacatcttacttatagtgatgagtttttggagttggatgaattaccacaaagaatcgtctttgttggtggtgggtatatttcgtttgaatttgctcatatcgcggcacgtgctggatcagaagttcatattatccatcgaggtcaaagacctttggagaattttgatatagatcttgtagatatccttttagaaaagtcgaaagagattggcatacaggtacatcttcaacattccgttgaatccattgaaaaagaacaaggaaagtttcatgtgtacgctcgaaaaaaagaggatataacgcggtttgaagcagacattgttattcatggtgctggacgggtccctgccttagatatgaatcttgaaaaaggaaatatagaaaggaaaaaacatggtgtccatgttaatgagtatttgcaaagtgtaagtaacccgaatgtctatgcagctggagatgctgcagcaacggatggcttgcccctcacacctgtagccagtgcagattctcatgtcgtagcatctaatttattgaaagggaacagcaaaaaaattgaatatcccgtgattccatctgctgtatttaccgtacctaaaatggcatcggtaggtatgagcgaggaggaagccaaaaactctggccggaatattaaagtaaagcagaaaaacatctccgactggtttacgtataaacggacaaatgaggactttgctgcgtttaaagtgctaattgacgaggatagtgatcaagttgtcggtgctcatttgattagtaatgaagccgatgaactaattaaccactttgcaacagccattcgctttggaatttcaaccaaagaattgaaacaaatgatatttgcctatccaacggcagcttcggacattgcacacatgttgtaagtttgcgttttgtgagatgtttataaaccactttatcgtctaatcttgttatatgatcttagaatcaaaaagaaaataacttttttgacagccacatttttcaacggaagaatgtggcttcttggcgtgaagagcagatatctttattcttaaacttctaaaaaagcttatgtgaacacttgataaataaggttttttatctgacctattttataagattattctataaaagaaaaaataatgtatgacttgaccgtgtactatggtacagggtttatactttttattgaggtgacaatatggagatgaaaatcagtgaattggctaaagcgtgtgatgtgaataaagaaaccgttcggtattacgagcggaaaggattgatagccgggcctcccagaaacgaatcagggtatcgaatatattcagaggaaacagcagatcgggtacggtttattaaacgaatgaaggaattggatttctcgctaaaggaaatccacctgttgtttggtgtggttgatcaagatggggagagatgtaaagatatgtacgcctttaccgttcaaaaaaccaaagaaatcgagcggaaagtgcaggatttgttacgaatccaacggttattagaggaattaaaagaaaagtgtccagatgaaaaggcgatatatacctgtcctattattgaaacgttaatgggagggcctgataaataaatgggggaagatttgaatgaaaaaacgcatttccttcaccgctataatgacggtgttgttaatcggtttaacagcttgtggagcagaatctgataccgcgaatgaatcaaaggttcaagacattcaaggaaatccagtcagcctacctaatgagaaacccacactcatttattttatggcaacctggtgtccatcttgtatatacaatgaggaaatctttaaggaaattcatcaactaaacccgaacgatgttcaattgatcacagttagtttagaccctaacacagatacaaaagaaagctttgcgaaatttaaaacaggattatggcggggattggccccatgttttaaagataggagtggaattatgagtttttcgtttctcttcattctgaccgctggaatggttgcggcctttaatccttgtggtatcgccttgcttccttcttatatctcctatttaattggaggcgaaacaaaggatcattcgttccgctatgcaatttttaaaggattagggcttggtggagcgatgaccacggggtttttaacgatttttgtattggctggtttgttgataggaggattgggaagcgcactaacagggatttttccgattctttcattggttatgggtatactcattgctttattggggttgggcatgctatttgggaagcatttgccgattaaaataggatcttttcaagtcaagccagggaaatggtctatctatttttacggaatagcctatgccgtgacatcacttggttgtaccttgccagcctttatgttggtggtctctgcatcgctgaatgacaatagcgtaacggccgtgatcatcaagttcatcatctactcccttggtatgggaattgtggtgacagcgatcacgatggtctcattgatttcacgacaattggtacagaagtttctgcacaactatatgggttctatccaaaaaatagcagctgttgtgattttcctctccggtttgtacatggcttattactggtatttcggttctggtggcatttgtacattttaaaatccaaccgatcaggtgtaacaaaaaatagatgaaagatgtaaaaaagctaaacgaacaaatttcaagttaggctataggccatgtatgtaccttaaccaaagaataaaatttttttagaaagagtggtgagaatgatggatgagaatcgctcgaaaggtaaccgctggggtgtttgggcctttttcggaatattattggttcctttattggttcctttactttgttgcgcaggaccgattctccttgttgcattagggagcacaggtattggtgccctctttgctggtgcgacaggaaattggtggttgaccggcatttttgcagcattggccattgttatgattgctctgatcctcagcaagttgttgaagaacaaatacaattctcctgaaggcaatggaaaaacaaaaaataaaacggattgctgtacgcctccagagagcgtggatcggaaacatgagacaagataaatatgagataaatgtacagaactgtctatcaaactttaaatagaaagagggattcaaatgactcaaaattcatataaaatacccattcaaggcatgacatgcacaggctgtgaagaacatgtaaccgaagcattggaacaagccggagctaaagatgtttcggccgatttccgacgcggtgaggccatttttgaactcagcgatgatcagatcgaaaaggctaagcaaaatatttcggcagccggctatcaacccggagaggaagaaagccagccctctgaaaacagtgtagatttcaatcgggatggcgattacgatcttctgattattggttccggcggtgcggcgttttctgcagctatcaaggccaatgaaaacggggcgaaagtggccatggtagaacggggaaccgtcggggggacctgcgttaacatcggttgtgtaccgtcaaaaaccatgcttcgtgccggtgaaataaacggtctcgcccaaaacaatccgtttaccggacttcaaacgagtaccggtgctgcggaccttgcccaattgaccgaacaaaaagatggattagtcagtcaaatgcgtcaagaaaaatatatagacttgatcgaagaatatggatttgatctcattcgtggcgaggcctcgtttatcgacgataagacgatacaagtgaatggacaaaacatcacgtctaaaagctttttaatcgcaacgggggcttctccggctgttccggaaatcccgggaatgaatgaggttgattatttaacaagtacatccgcactcgaattaaaagaggttccacaacgattggcagtgatcggttctggctatatcgcagcggaattaggtcaaatgtttcacaacctcggaacagaagtgactctcatgcaaagaagcgagcgtctgtttaaaacctacgatcctgaaatttccgaagccatcgatgaatccttaactgagcaaggacttaacctgatcactggggtcacttatcaaaaggttgagcaaaacggtaagtcgacaagcatttatattgaagtgaacggtcaagaacaagtcatcgaagccgatcaagtcctcgtggcaacaggaagaaagccgaacacagagactttaaaccttgaatcagcaggtgtgaaaacagggaaaaaaggcgaagtgctgaccaatgaatatttgcaaacgtcgaataaccgaatatatgccgcgggcgatgtgaccctcggtccgcaattcgtttatgttgcagcttatgaaggcgggattgtggcaaataatgcgttgggtctagcgaaacgcaaaatcgatcttcgctttgttcccggcgtaaccttcaccaatccatcgatcgccacagtcggcttgactgaacaacaggcaaaagaaaaaggttacgatgtcaaaacatcggtccttccgttggacgctgtaccgcgggccttagtcaatcacgaaacaacaggggtctataaacttgtagtcaacgcccaaacccagaaattgatcggggcgcacattgtgagtgaaaatgctggagatgtgatttatgcggcaacgttagcggttcaatttggattgaccattgaagaccttacggatagctttgcgccttatttaacgatggctgaaggattaaagcttgcagccttgacgtttgataaagacgtatcgaaattatcttgttgtgcaggctaatggttccttttgattctaatgctatgttgcaggaggcacttaaaacaatgaagtggagaaaatataaggaggaataagcttatgaaaaatatttcagaattctcagcccaacttaatcaaacttttgatcaaggggaagccgtctctatggagtggttattccgtccgttgctaaaaatgctggcggagggcgatccagtccccgttgaggacatcgcggcggagaccgggaagcccgtcgaggaagttaagcaagtcctacagactctacctagtgtggaacttgatgagcagggccgtgtcgtcggttatggcctcacactggtccctcccccccatcgcttcgaggttgatgggaagcaactatatgcatggtgcgcccttgacacacttatgtttccagcactcatcggccggacggtccacatcgcttcgccttgtcacggcaccggtaagtccgtacggttgacggtggaaccggaccgcgttgtaagcgtcgagccttcaacagccgttgtctcgattgttacaccagatgaaatggcctcggttcggtcggccttctgtaacaacgttcactttttcagttcaccgagtgcagcccaagactggcttaaccaacaccctgagtcgagcgttttgcccgttgaagatgcctttgaactgggtcgccatttgggagcgcgttatgaggagtcaggacctactaatgggtcctgttgtaacatttaatcttaggcaattacgcctgcgtcaatcttggccttacgatgatgtcctgtaaccgaagctctatctagtgaaaccaattttatgggaaaccaaataaataaaaagatcaattgcttgtgcctatatcggggagttaataaagcgagaaagtggattcttgaatataggagtaaataaggtgccaaaatggcaccttatttaaaatatgtaacgccaaggtctgccgtattatattgcattggaaaaagaaaaccttctgtataaggagatgttatatgatatttggtaaactgttcggcagtttgggcgtagaaagcttttgctccttgaacatcacgtttgccagttacaatgtcatttaacaagtttaaagataaaaaattcatcgcttcctcatgacactttgctgatgcctcacctgtagttcgatctaagtagacacttccatcaaaagcggcaatcgcatcatataagtgtacgggcactttataatcgatggtctgcttaaggaaatcaaggtgaggggtagggaagttatgagggactggatccttatatactatcgtgcgtttccatggcccgctattgtaccaaattaatcgtctcattgttgcttcctggggatatccatacttactaattatggtttttgccccttccaacggtggtccctgccaataggacaaaatgtgatttaaatgggttctgttgcaaagtaaaaaaatatagctaaccactaatttatcatgtcagtgttcgcttaacttgctagcatgatgctaatttcgtggcatggcgaaaatccgtagatctgaagagacctgcggttctttttatatagagcgtaaatacattcaataccttttaaagtattctttgctgtattgatactttgataccttgtctttcttactttaatatgacggtgatcttgctcaatgaggttattcagatatttcgatgtacaatgacagtcaggtttaagtttaaaagctttaattactttagccattgctaccttcgttgaaggtgcctgatctgtaattaccttttgaggtttaccaaattgtttaatgagacgtttgataaacgcatatgctgaatgattatctcgttgcttacgcaaccaaatatctaatgtatgtccctctgcatcaatggcacgatataaatagctccattttccttttattttgatgtacgtctcatcaatacgccatttgtaataagcttttttatgctttttcttccaaatttgatacaaaattggggcatattcttgaacccaacggtagaccgttgaatgatgaacgtttacaccacgttcccttaatatttcagatatatcacgataactcaatgtatatcttagatagtagccaacggctacagtgataacatccttgttaaattgtttatatctgaaatagttcatacagaagactcctttttgttaaaattatactataaattcaactttgcaacagaaccgtattatggaatagagatgttggtaacatttatacaggatcattatacttaagtttaatttcgttattacagaaccacacattccaaccagaagagaaagtatgtctatttagttatggttcaggagcagtaggagaaatctttagtggttcaatcgttaaaggatatgacaaagcattagataaagagaaacacttaaatatgctagaatctagagagcaattatcagtcgaagaatacgaaacattctttaacagatttgataatcaagaatttgatttcgaacgtgaattgacacaagatccatattcaaaagtatacttatacagtatagaagaccatatcagaacatataagatagagaaataaactagtggccgattgtgcttgatgagcttgggacataaatcctaactcgaaataaataagcatatcactaaactgattttttaaagtttacagtgatatgcttatttttttatcttacgattttgtacgtgcatgcttgcctaggggtatggctcgagccattagtctctcgcacatactattccctcaggcgtcagcacttacaaaatcggttgtaattttcatttttatacgcattcttactgagattatactaataagaggaatagtaaaagcaattctaagtaaaattgcagataagaggtttgttaaaagcagttctaagtaaaattgcagataagaggtttgttaaaagcagttctaagtaaaattacagataagaggtacgttaaaagcagttctaagtaaaattgcagataagaggtttgttaaaagcagttctcagtaaaattgcagataagaggtacgttaaaagcaattccatgcaaaattgcagataaggggtaagttaaaagcagttctcagtaaaattgcagataagaggtacgttaaaagcagttctaggcaaaattgcagataagaggtgcgttaaaagcagttctcagtaaaattgctgataaggggtaagttaaaagcaatcctaagtaaaattgcagataagaggtaagttaaaagcaatcctaagtaaaattgcagataaggggtacagaaaaactagacttgattacaaaatggagcttgggacataaatgattttttaaaaatgagatgagacgtagattaactccataatcaatacgaatctatcgacttctttatttatgatattcatctctttttaatggaaataaaagtgcgattaatgtgataatacagttacgttaattaaaaaaataaaaatgcaaggagaggtaatatgctaactgtatatggacatagaggattacctagtaaagctccggaaaatacaattgcatcatttaaagctgcttcagaagtagaaggtataaactggttggagttagatgttgcaattacaaaagatgaacaactgattatcattcatgatgattatttagaacggactacaaatatgtccggggaaataactgaattgaattatgatgaaattaaagatgcttctgcaggatcttggtttggtgaaaaattcaaagatgaacatttgccaactttcgatgatgtagtaaaaatagcaaatgaatataatatgaatttaaatgtagaattaaaaggtattactggaccgaatggactagcactttctaaaagtatggttaagcaagtggaagaacaattaacaaacttaaatcagaatcaagaagtgctcatttcaagctttaatgttgtgcttgttaaacttgcagaagaaatcatgccacaatataacagagcagttatattccatacaacttcgtttcgtgaagactggagaacacttttagattactgtaatgctaaaatagtaaacactgaagatgccaaacttactaaagcaaaagtaaaaatggtaaaagaagcgggttatgaattgaacgtatggactgtaaacaaaccagcacgtgcaaaccaacttgctaattggggagttgatggtatctttacagacaatgcagataaaatggtgcatttgtctcaatagaaagttagaggtgagtcttacgtttcagtgacggtagacttacctttaacatgttacatactaaaaaattaatttgaataagaaagagagacatatatgaaatacgatgattttatagtaggagaaacattcaaaacaaaaagccttcatattacagaagaagaaattatccaatttgcaacaacttttgatcctcaatatatgcatatagataaagaaaaagcagaacaaagtagatttaaaggtatcattgcatctggcatgcatacactttcaatatcatttaaattatgggtagaagaaggtaaatacggagaagaagttgtagcaggaacacaaatgaataacgttaaatttattaaacctgtatacccaggtaatacattgtacgttatcgctgaaattacaaataagaaatccataaaaaaagaaaatggactcgttacagtgtcactttcaacatacaatgaaaatgaagaaattgtatttaagggagaagtaacagcacttattaataattcataataaaacagtgaagcaaccatcgttacggattgcttcactgttttgttattcatctatatcgtattttttattaccgttctcatatagctcatcatacactttacctgagattttggcattgtagctagccattcctttatcttgtacatctttaacattaatagccatcatcatgtttggattatctttatcatatgatataaaccacccaatttgtctgccagtttctccttgtttcattttgagttctgcagtaccggatttgccaattaagtttgcataagatctataaatatcttctttatgtgttttatttacgacttgttgcataccatcagttaatagattgatattttctttggaaataatatttttcttccaaactttgtttttcgtgtcttttaataagtgaggtgcgttaatattgccattattttctaatgcgctatagattgaaaggatctgtactgggttaatcagtatttcaccttgtccgtaacctgaatcagctaataatatttcattatctaaatttttgtttgaaatttgagcattataaaatggataatcacttggtatatcttcaccaacacctagttttttcatgcctttttcaaatttcttactgcctaattcgagtgctactctagcaaagaaaatgttatctgatgattctattgcttgttttaagtcgatattaccatttaccacttcatatcttgtaacgttgtaaccaccccaagatttatctttttgccaacctttaccatcgattttataacttgttttatcgtctaatgttttgttatttaacccaatcattgctgttaatattttttgagttgaacctggtgaagttgtaatctggaacttgttgagcagaggttcttttttatcttcggttaatttattatattcttcgttactcatgccatacataaatggatagacgtcatatgaaggtgtgcttacaagtgctaataattcacctgtttgagggtggatagcagtacctgagccataatcatttttcatgttgttataaatactcttttgaactttagcatcaatagttagttgaatatctttgccatcttttttctttttctctattaatgtatgtgcgattgtattgctattatcgtcaacgattgtgacacgatagccatcttcatgttggagctttttatcgtaaagtttttcgagtccctttttaccaataactgcatcatctttatagcctttatattctttttgttttaattcttcagagttaatgggaccaacataacctaatagatgtgaagtcgctttttctagaggatagttacgactttctgtttcattagttgtaagatgaaatttttttgcgaaatcacttaaatattcatccatttttttaacggttttaagtggaacgaaggtatcatcttgtacccacttttgatccatttgttgtttgatatagtcttcagaaatacttagttctttagcgattgctttataatcttttttagatacattctttggaacgatgcctatctcatatgctgttcctgtattggccaattccacattgtttcggtctaaaattttaccacgttctgattttaatttttcaatatgtatgctttggtctttctgcattcctggaataatgacgctatgatcccaatctaacttccacataccatcttctttaacaaaattaaattgaacgttgcgatcaatgttaccgtagtttgttttaattttatattgagcatctactcgttttttatttttagatactttttttattttacgatcctgaatgtttatatctttaacgcctaaactattatatatttttatcggacgttcagtcatttctacttcaccattatcgcttttagaaatataactgctatctttataaacttgtttgaaatttttatcttcaattgcatcaatagtattattaatttctttatcttttgaagcataaaaatatataccaaacccgacaactacaactattaaaataagtggaacaatttttatctttttcatcaatatcctccttatataagactacatttgtagtatattacaaatgtagtatttatgtcaaaataatgttataatttttgtgatatggaggtgtagaaggtgttatcatcttttttaatgttaagtataatcagttcattgctcacgatatgtgtaatttttttagtgagaatgctctatataaaatatactcaaaatattatgtcacataagatttggttattagtgctcgtctccacgttaattccattaataccattttacaaaatatcgaattttacattttcaaaagatatgatgaatcgaaatgtatctgacacgacttcttcggttagtcatatgttagatggtcaacaatcatctgttacgaaagacttagcaattaatgttaatcagtttgagacctcaaatataacgtatatgattcttttgatatgggtatttggtagtttgttgtgcttattttatatgattaaggcattccgacaaattgatgttattaaaagttcgtcattggaatcgtcatatcttaatgaacgacttaaagtatgtcaaagtaagatgcagttctacaaaaagcatataacaattagttatagttcaaacattgataatccgatggtatttggtttagtgaaatcccaaattgtactaccaactgtcgtagtcgaaaccatgaatgacaaagaaattgaatatattattctacatgaactatcacatgtgaaaagtcatgacttaatattcaaccagctttatgttgtttttaaaatgatattctggtttaatcctgcactatatataagtaaaacaatgatggacaatgactgtgaaaaagtatgtgatagaaacgttttaaaaattttgaatcgccatgaacatatacgttatggtgaatcgatattaaaatgctctattttaaaatctcagcacataaataatgtggcagcacaatatttactaggttttaattcaaatattaaagaacgtgttaagtatattgcactttatgattcaatgcctaaacctaatcgaaacaagcgtattgttgcgtatattgtatgtagtatatcgcttttaatacaagcaccgttactatctgcacatgttcaacaagacaaatatgaaacaaatgtatcatataaaaaattaaatcaactagctccgtatttcaaaggatttgatggaagttttgtgctttataatgaacgggagcaagcttattctatttataatgaaccagaaagtaaacaacgatattcacctaattctacttacaaaatttatttagcgttaatggcattcgaccaaaatttactctcattaaatcatactgaacaacaatgggataaacatcaatatccatttaaagaatggaaccaagatcaaaatttaaattcttcaatgaaatattcagtaaattggtattacgaaaatttaaacaaacatttaagacaagatgaggttaaatcttatttagatctaattgaatatggtaatgaagaaatatcagggaatgaaaattattggaatgaatcttcattaaaaatttctgcaatagaacaggttaatttgttgaaaaatatgaaacaacataacatgcattttgataataaggctattgaaaaagttgaaaatagtatgactttgaaacaaaaagatacttataaatatgtaggtaaaactggaacaggaatcgtgaatcacaaagaagcaaatggatggttcgtaggttatgttgaaacgaaagataatacgtattattttgctacacatttaaaaggcgaagacaatgcgaatggcgaaaaagcacaacaaatttctgagcgtattttaaaagaaatggagttaatataatggataataaaacgtatgaaatatcatctgcagaatgggaagttatgaatatcatttggatgaaaaaatatgcaagtgcgaataatataatagaagaaatacaaatgcaaaaggactggagtccaaaaaccattcgtacacttataacgagattgtataaaaagggatttatagatcgtaaaaaagacaataaaattttttaatattactctcttgtagaagaaagtgatataaaatataaaacatctaaaaactttatcaataaagtatacaaaggcggtttcaattcacttgtcttaaactttgtagaaaaagaagatctatcacaagatgaaatagaagaattgagaaatatattgaataaaaaataaaattgttgtgtttacaacaatacatagaaaacagaggaaacaatcaagtcgttgaatatttcctctgttttttagttgaaaaaattaaccgaaagcctgaatgcaagtcttgattaaatcaataatgcttgtaataacaccagtgaaatccatatgcataccctctttctatttaagatacattaagtataatatcaaacaaataaaaaatgttaaaaattccctaattggctatttagattgcataaatgtcaaaaatttgaaaaacatacaacgactttgcataaaaaatcgtcatattggaaatacgtaatttattgaaataataaaaaaaataaaagaacgaagatgataacctaagtgaggttttaagttgttctaaggtttaatttaatttatgttaaaatagttggtataaaaatacatgataaactataaactaaattcaaaataacttatggggtaggcaattatggaaaatattttaaatataaatgataatgaaaaaagagtgctaagggaaatttataaccatcataatatttcgcgtactcaaatatctaaaaatcttgagattaataaggcaacgatttctagtattttgaataagttaaagtataaatctcttgttaatgaggttggtgagggtgatagcacgaagagtggtggtagaaaacctattcttctgaaggttaatcatctttatggttattttatttctttggatttaacttatagttctgttgaagtgatgtacaattattttgatggtaatgtcattaagcatgaatcttatgatttacctgatgaaaaggttagtagtatattaagcataataaaaaaacatattgatattcaggagaaacttgatacttataacggactattaggtgtgtctgtttctatacatggagttgtggataatgagcagcatgtgacatatttaccattccatgaaactgaaggaatttcaattgctaagaaaataaaagaaattactaatgttccagtcgtagttgaaaatgaagcgaatctttcagcgttatatgaacgtaattttaatcataatttatcctacaataatcttattgctttaagtatacataaaggtattggtgctgggcttattattaataatcaattgtatcgtggtgcaaatggggaagcgggtgaaattggaaaaacacttgtctcaaaagttagcgataatgtggagatctttcataagattgaagatattttttcacaagaagctttactgcataatttaagtaatcaactaaatgagaagatgacgcttagcaaattaattcaattttataatgaaaaaaatccagtcgtagttgaagaaatggaacaatttataaataaaattgctgttttaatacataatttaaacacccagtttaatccgaatgcaatttacattaactgtccattgttcaatgaaatgcctgaaatattagaagcaattaagaaccagttcaaacaatattcacgtaacgaaattcaaataaagttaacatctaatgtcaaatttgcaactttgctaggtggtacattagcaattatccaaaaagtactacagattaatgatatttacttagatataaaagcataaaaaactaattcaaatgaataatcaaagttcgtaattgtctttataaaaaaatccctcaatccgaattgaattttcggattgagggatttttatagttctattgcagaagaaaactattttaaaaatgctggtaaatgttgatagccacctctaacgttaacaatattcgtaaatcctttatattctaatattcctaccgctattgaacttctaacacctgattgacaatgtacataaattaggtcatttttatcgaaaggtatatcttcatttaaaagtttaccgtgaggaatatgaattgcttgttttaaatgacctttacgccattcatcatcattacgaacatctaatacattatgttcttcaccagtcatttcagaactatgaatagatgatgtgacgatatttgtttgtggcaaacggtaactttttacattttcaaaaccaattaattgtaaagcatgaatagcttgttgaacggtagatttatcgccaattaattcaatatcttagtcataatctaaataccaaccaatttgatttataaaagttttattaaaaggaatattgatagttccatgcatatgaccaccatggaatgcttctttacttcgaagatcaaaagcagtttgtgtattgcttgaactagggtaaacattatatggttggtacatttgcataccaaattgatttatttttttcatttgtgaaaaatggtgtggtggagctggctgattgagtgttaaagtttcgataaatgaagtttcatctttaacattaaaagcccagttgtttattttctcataacccaaagtagttgtaggtaatgaacctagcgctttaccacaaggactccctgcaccatgacctggccaaatttgaatatagtctggtaatgttgcagcaaattgtatggactgatacatttgttttgctccgatttttgtagaaccttcaacatttacagctttttctaatagatctggtctacctacatcaccaacaaagatgaagtcaccgctaaataatcccattggtatactggaacccccaccttcgtcagtaagtaaaaaactaatactctcagggggatggcctggagtgtgtaagacttctaatttaatctttcctaaatagataatatcttgatgcttaacgaaatgtgtttgtttaggcatatttttataattaaattcatctttaccttcatcagatacgtatatacttgcattcaatttatttgccacatctctaatacctgaagcaaaatcagcatgaatatgtgtttctgcagctttagtaattgtgaatccttctttatctgcaacttttaaatattttgttaaatctcgtatagggtcaataatcattgcttctcctgtacgttgacatccaattaaataagatgcttgtgaaaaattgtcttcataaaattgtttgaaaaacaaaaaaactcctttttaaaatagattttattgattagataaataagttatgatttgcttgctcagtatgtccaatataagtacctacgccaccataatcgacttcatctcttaattcttcttttgaaattcccataacatccatactcatggtacaagcaattaactttatatcttgatcgattgcttgatcgataagtgagtataaagaatcaacatttttcttgttcattacataacgcatcataatattacctagtccaaacatattcatttttgataatggcatatgtattggatccttaggtaacataaggtcaaacattttggaaatacctttctttttaacgcgagttgattgcgctttttttaatgcgttgaggccccaaaaagtaaagaaaatagttacatctttacctgctgctttagcgccatttgcgatgatcattgctgctactgccttatctaactcaccgctaaataaaacaattgttgtacctgtagcagtgtcattgatttcaaattcttttggcttttctttttgaataattgcattaattacatttgcttcttcagtaagatttacaagggtattccctgtttgtttcgcccaacttttaatatcactattgaaaccaggatctgtaactgttacctcgatttgctcacccgttgaaatattgttaatttctttactgatattaacaataggtccagggcactgaagacctctaaaatcaaattgtttacgattctctttgatttcaatatctttttctattaaaggagcactattgaagttctttgcttcataatctttatatccaccctttaaattcacgacatcataaccttgtttggctaaataatcgcaagctttagtgcttcggttaccgcttttacaatgtatataatacgttttgttgctattcttattgaatgatttaatctcttctactgggtgtaaagttgaaccgttaatgtgtcctaattcatattcttcttttgttctaacatcaatcaattgacccatttttgccaatttttctaattcttctttgtttaatgaattaatgtgtacttctttgtattgttccatacttacctcctataaatacctatgagggtataataaaacggatagaatcatttgccaaatacctataggggtatttgacaattttgttttaatttattattattaacttaatcaatttatgtggaggaaatgaatatgacttatgataaaaaaatgattaatcgtataaatagaatacaaggtcaattaaatggtgtcgtaaaaatgatggaagaagaaaaagattgcaaagatataattacgcaacttagtgcatctaaaggttctatacaacgtttaatggggattataattagtgaaaatttaatagaatgcgttaaaacagcagaagaaaataatgaaagttctcaagaattaattaatgaagcagttaatttattagttaaaagtaaataatggatatagcaaatatgactattatgttgctaattggcgtactgggtggatttatatctggattaataggtattgggggcgcaattattatttacccagctattcttatattgccaccattaataggtatacctgcgtatagtgcatatattgcttcgggacttacctctagtcaagtatttttcagtacacttagtggatcattaaatgcaagaaaacaaccagctttctctcctaaacttgttatatatatgggagggggtatgttgattggaagcatgttaggggcaattttagctagtttgtttaatgctacttttgtaaatacggtatatgtaataatcgccatacttgctttaatattgatgtttattaaagttaaacctactacacaagagacgaaatctaaacctttgctatttattatagttggatttggaattggtgtaatttcgggaattgtgggtgcaggtggagcatttatcatcattcctgtattattagcattatttaaattaccaatgaatacggtagtgaacaatagcatagcaattgcttttatatcttcagtaggggcattttttataaaattaatgcaaggatatataccagtagaaagtgcaatttttttgataattgaatgatgatcattttctgaaaatattatgtggtcatataatataatgcccatcatttcactaatctcttttattctctgagttattttgatatctcctggagaaggtgtcggatcttatcaagagtaaattatgaaaaaaatggtttaaatcaatgttcttactttaagtacatgtgtttaacgtaaatgataattagttaaatataaaaaggttatcccaatcaataggataacctctttatactttactttatggtttggattcgccacttcaaagaagaaatgaaatcagagcattgaatgttccattttcaaacaatatataaatacctagcccaatgaatacaattggtacaatccaacgttcatatttctcaattgtttccgatataaaatcgaaggaagctagacggtaactgacatagcacaaaactccaaccataattagaaagacaatagtgacaataaagatttcagacatacttaaggtcgtgaagtacggtatataaatggaaaagtcatccgcactggaagccaatacgatgaaaatcatcgtcaaaaataactgattaaattttccagaggagaataaagataaaatgctactttcatcttcatcctcttctcctttaatccatattttcacgcctaggtaaagtggtaaaagtccaagtagtccgataacccattgctgaggaattaaatttacaaccccctgtgcaactaaaagacttgctcctatcacaattgcagtccctatatattgtcctatccaaatatgttttacctgacctttttttacttgcgaaaacaaaagaattaatatgacgagataatcaattcctgttgctacatataccgcagtagccgtcagtatcgtcgcgatcattttatcatctccaaatattttagggataggacttttcttcaaaatgaaaagtccttccgtaaattgcacacatatagtacttatttatccttcactctcatcagtcgcaaactatttaatgctaccaaaatagtggctcccatatcggaaagaatcgcaatccaaagggttagccagcctggaataaccaatagtaaggcaattatcttaattccgatggcaaacgtgatgttcgctttgatgatatttagcgttttcctgctaagtcttactgcaaatggaagcttacttaaatcatctcccattaatgcaatatcagctgtctcgatggcagtatctgttccagcaccgcccattgcaatgccaacagtggatgcagcaagtgcaggagcatcattgacgccatcgccaatcatagctacattaccatgctcggctttcatttttttaatatagtccaacttatcctgtggcaacaattcggactgaatatcagaaacgcctacatgagcaccgattgcttctgcggtaccttgattatcacctgtcagcataattgtttgcttgattcctaactgatgaagttttagaatcacatttttacttgtttcgcggacctcatctgctacagcaatcacgccgaggattgtttggtccgttccaataatcatggccgttttcccttggttttgtaaaactttcactttattttcaaactcaaggctaaaatcggaaacatttaattctttaaaaagccttggactgccaatgtaataggttgttccatctatattcccttgaatgccccgacctgtaatagaagtgaagtccttcactctaacatcggaataagtaatattatcttgctctgctttcttcattattgctgaagcaagtggatgttgtgatcgatattctaaagctgtaataatggaaaacagctctttttcttccacttgatcatttaacactttaaaatctgttaccactggtacaccttttgtcagtgttcctgttttatcaaatgcgattgccttaatggctcctaattcctctagatagacaccgcctttaatcaacacaccttttttagctgcatttccaattgccgagacaatcgagattggagtagtaataactaatgcacacggacatccaactacaagtaccgctaatccttgataaacccaagtatcccaacttccaccaaagaataaaggtggaacgactgcaacgagcgccgcaataaccataatgatcggcgtataatatttcgcaaatttatctacgaatgcttgcgctggagcgcgctccccttgtgcttcctcaaccagatgaataatcttggagatagttgtatcctctacgtatttggtgatttttacttcaagtagtccctcttcgttaagcgtgcctgcaaatacttcatcatctaccgttttggcaacagggacagattctcctgttatagcagcctggttgacagccgacacaccatttataatgatcccatccatggcaattttctcccctggtttgacgatcataatatcacccacggcaatatcgtccacatggatcattatttcctgaccattccgcctaacaagtgcttcttttggggcaatatccatcaatgaacgaatggactgtcttgctctatccatagaaaaacgttcaagtgcttcactgattgcaaagagaatgacaacaatggatgcctctgcccattcaccaatgatggcagctccaataactgcaacggtcatcagggttttcatgtcgaaatcaaagcgtatcaaattttgaaaaccaactttaaatagtgaatatccgccaattacaatcgaacttacaaataacatggacgttacaaggttatcttctccatttacaaagtgagaaaggtaaccaaaagcaatcagtaatgtggcaaacagcaatgtgctgtgttttttataaaacggtattttctcttctttaggagccttagtgtcttctttgaccgcttgtatcgatggattcgccagtttttcaggaattaccttaagattctcgaaagcacctgctttttcaagctcttcaaccgatgcgtttccatatacatcaattttagaagcgccaaagttcacttttgcatcctgaactccagctagttgttttacatttttttcaaacttcccagcacagtttgcgcaagaaaatccctccacacggtaaacatttttatcttctgttaccactggttcgacccttcttctagccttctctggtgccactttaagattctcgaaagcaccagccttttccagatcttcaacggttgcactgccaaagacatcaattttggaagctccgaaattgactttagcatcatgcacccctgatagttcttttacatttttttcaaacttcccagcacaattcgcacacgagaaaccctccacacggtaaacctgtttatcttctgttaatgtttttgttgaactatccaatactagcaacctccctttgatgcaagaaagctttttctacaagctgtttaacatgctcatcatctagtgaataatagactaattttccttctttacggtattttgctatacctaaatttttcaataatcttaaatgatgggatgccgtagccgttgaagattcaatgatattagctacatcacaaacacataactctccctctaaagacaaaacataagcaattttaactcttgtatcatctgatagagccttaaaaactttcgctacatccataggattctgtttagcaaggtcttttttagccctgtttaccttatcttcatgaatataggtaacttcacacatatcttttgtcataattaccctccttattcaaatgactgtttgtttgatgattataatatatcccactataaacaaatagtcaaatgattgtttgaatgatatataattaatattaaaaaggattggtttctaatgttagaaaccaatcctttcggagattttaaccaaattttaaagtatcttaaacataactgccccgttagtttaagtgcatcctttcacaatctgtctacagattaataataaaaactactctttattatacagatctccatataatttttgaatttggttctgtaattttttattttctttttctaattccataactcttctttttaaggtttttataaggatttcctccgaacgagaacttttcttgggttttgagactacatttgatgttatttgacgctcacgaagggattcgattctttgcctaatatcgtgttccttataaagccatgatttagaaacattagcttcctttgctattgaattaaaattaataactttaccttcaatcgaaaatttagaaatcgctttgtctactttttcccttgtcttttttgatttctgcttcgccaaacgtacaatttctgttgtatttctaacttgtttatccattgataattaccccgtcaaacttccaatgatttgttctaaacgctctttaacacggctattagtctctacttgtctttgccattgtttatccttagctatggctaataactcttctgtacgctctaactgttcttcgtgctgtggtaagaattgcttactggtacagaagtgagtgcaatctaagcatgcattcgcatgtggacaaccacctgctattactggcaatctacaataaccatttggaagcacttgtgcatttatatttttcttgaaccattgaagctctacatcatcgacttcactatcatcatctagattgagcacatctccattattggtaaccagtttttcttgaaatttagtaaattcattttttagagtttcatcaaagatatgagcgtatctgcttgtcatttctgggctttcatgtcccaaaaatttctgcacaatatgctggggcaccccgttgttaatcattcttgttcctactgtatggcgaaaggcatgggcatggaatctataaatctcacctgatttatccactatattttgctcataagctaatttatttaactcacctctaaatgtttcttgttttaatggcgatccatcttttcttggaaagaggtattcactatctggaaattcctctgaaactttatcttcccgaactttaataagtaaagctacctctttagatattggaactatatgcttctttttcattttccattgataatactttaaaaagtaatctccatctttgtcctctaataaacagccttttttcaaggtgcacaattcacttatcctcattccacattcttgaacaatcatagtcatcgtagctatatattcgggtaatttatcaagatgactgttcaattgctctagaacgaattcgtctataaagcgaggttttgctcttggtattttcggatagtcctcgggataaattaataatttggaaggaacatcatcccattctagcctatgaagggtactaaatagtccttccaatatagagatcctcccagttattgtactaggttttatccccatcatgtttagttcacttaaatatgcttcaatttccactctcgttaattggtgtactctctgaacgtgtttaaactttatgtccagaaaattaaagaactctttaagtttttgggcaatatcacttacataggaaaagctatccatgttcaatcttaacttacaatatctttttacaagctgtttaaaatatgtattccgaaaccctttaaagttaattgtatattcatattgtgttgggttaaccttatcatctggcaaaggtaagtttcgtctatcccaaacgtctttatcccactcctctccatcaaaataaaaatcctcataaaactcaataaattgtttaagattagtaacatagtaagaattagcttttacaggtgttttttcttgattagcagtaatcttataattagtggtggtaattctaacaccctgttttgtcaaatatgttctatactccgtcattgctttatcaataggaacttcagtaattgaagtaatgctgggatactttaaatctaaaaaatccaacattttattaattactgttccttttctaatccagacagtttttgcattccatattccattgtttaaatggtaaaaataaaaatatttcaattctgttcttaaccacagatttttaacacgttcaaaacgaacccaacgatttcttaaagcaggattcttacttaattctatggcagaaggatgtggacattttcttatatcccaactattattagcccaaaacccttgcatttcttcattcattacagctatttttttgctgatctcactctgactgataattttccttttactagaagcattcatttagctggtattctttatctagtaataaatacaatggatacggcttattctccacttctatcctttgaaccctcacacgcgcccccctctttaaacactttaagtactacaaattataaaccttgttaatttttatttaaagtaaaatctccctttaacatctcctcctgaactactttaactactattatttattatactatggttaatatgtctccacttgggtggttatggccaataatcatacccgttgcgttacttaatatggctgttttaaatatttctcgaggatgtataaccgcaaaattaatggttcctatagagacggtttcaatatgtgtaggttcatttttgctattcaagcaaattaaaatgaagtgttctcggtcagcatttcctatgaagtcacgcataatatcagcagcgtcttttggttcttcaatacgtctttttaaataccaaagtgtatcttctttaaccatttggactttgacaacatctattctttttctactcattatggataagctctatactttctattaagtcagggtgaacaatggatgtgatagaatcatcattcatataaatggaatatagctcatctaattctgaattatttttttgtttgatgaaaaggcgataatgcctttaataacatcgatgtgtggttgatgcattaaatattggtatacttctttccatgtttgattcattctatttagtctcctttaatggtttaattgtccatgcctttctagcgtatggatttaatggatgcatgatttcatttgtttgaggatttgttaatatactgattttcttactgtgaggttttaacatgtctaatacttcattcactcgattttccacaagaggtttttttccgtaggaaccccaagccaataaaacactatcggcttctttgacagctttcataatgtgaatatccgtgtgcttgtcatggctgttttcgatatgttttaaattaatgggggtatcaatatttgaaaaaagatttataaaattaacgccaccatattcatctttttcagctactttattgacaataagttgtgttgtaaggtcaacgttgataacaccatcataatgaggatacatcgttataattgtaagtacttctttatcaatatcccaagttttcttgagaagataacgatgcattttatcctgactaaatatcgcttcagtttctaatacacttttgattgatttcattttatctaactcctttatttaatattcttcaggtaacaacatgacgtaataagaaaggtctacatcatcttctcggataatgtagaccttattaatattgatagcttttgaataatttgccttatgaatttttacgtactctggacgttcttgcttatgtttgatatataattgactattatgcatattgaactggaatatatgaaagtaatcaatctcttctagttccttgaattgttcgttttcgcgttgcgctacaagtttccataactgttgctgcaacattgctggcaagtaattggcaatactacgtgtaatataacgtttcatgctcatttctccttttctatatctttcattattgtaataacttctgtaatgactgtgacgcttatctgagctatgtgtatccatttattcattattataattctccttttcaagtaagtgtctttgatctagtagtggcataactgtgttatgaagatataagaagtccatatcgtttgtttcatcaatataaccaatcgcaataagttgtttttgatagtagaggataaaggggtatatatgcctttcatgaagtgtgtcagagtagtaagtatacgtatgaaggattttgttggtaagcggaccaagtctgatatattgatcaggaaggatattatctgccacttcctcgatagattcacattcccatttttcgtcctttggcagattgaataagttagttatatactctttgagttgtttttctagtgtcatggttatgacctcctataatgtttttgatgtatacatgtaatacaccatatagataatatatgcttcaaaaaaattttgtttcgtttgtgaatcccattgttattaagaaaatatcccaatagaaaattatcacaattgttgatatgacaaggaaatcccattatcccgctcatttctcaggaaatatagcgatatatttatatatcatttggatttggtggtgtcagtacgacttactttttctttttatattatttatttataaataataatgggatttcgggattacgcttgcgtaatccttatcctacatgtatttatcaaatcccattgctatcccgttcatattttattttgggatgttctttcgtcatacaatataagcttcacattgagttgtgacttgttagtatgttgaaaagattcgttagatgggtgttattgaatgacgaaaggacagtacatagatattagatttgaagaaagagcgtttgaggcaaaaataaagacgaagtgctgaggagcacttcgtcgagaggggtattattgaaaagttgtttaataatttcattattgagttttagtgtaacgtagaactgttttttatgattaccgtctttacgaatatcaatacggtcaatgactgtaagatataatgctttgagttgtgctttatccattgattctatattttgaaatattcgttgtaatagggcagcgatttgtttcgtatcataagatagtttctcttgattttgttgctgtttgagttgattcatttgatttgtaatgtcattgagttgtgtttcatattgatgaatagttgctttcaatgcagatgttaggtccggattatcttcaatggttttaactaaattatggagtttcccgctgacttcatcgtattgttgttgtttataagcgatatcgtggttcaatgcaccaatatcgactttattttcttgattgacacgttctaagacttggttaatgactttatcacttttgacaatttcgagtatttgatccatgacgtatttctcaatcacatcagctctaacgctattcgcagaacatacttttgagcctttgtttcggaagttactgcaagaataataacgtattcgcttcttggtaccatctttcaatgtgttcgttgtgttactagctgccattggtgcaccacattgtggacaatgaacgatacctgttaatagattagttcctttaccgtggacttgaggtttttgactgacttgttttttacgtaattggactttatcccataagtcttgaataataataggggaatgcttaccttcagctattattggtttatcattcagccctttacgacgcttttcattccaatctttgtactttgcgaattgaattttaccaacatagaatggattagataagatataggtcactgaaccaatactgaaaggctttccttttttagtcacgtatcctttgtgattgagtgcattcgcaattttacgatatccgtggcctttagcatatgactcaaatatatatttgacaatattcgcttcatgttggtttatcatgagttcatgcttgctatccggtattttgtcatagcccagcggcaaattgccttgataatagccttcttgagcgcgtcgggtttgacccatgaatacattttcgacaatattatttctttcaaattctgaaaaactcgctagaatttgtagcatcaatttaccactgcttgtattgacttccatacgctcagataagctgaagaattcgacattttgacgatgaaggtcttcaacaattttgagtaagtcagaagtgttacgtgctagtcggtttgttttgtagaccataacagaatcaatctgaccttcgttcgcatcttttaacaaacgttgtagttctggtcggttcatagattttccagagatacctctatccgcgtatacatctacaacaacaaagttattgaaatcacaatattctcgaatttgattgatttgtccatcgatactatagccttcagtactttggatttccgttgatacacgaacatagataccgacacgtttttgtttgagttgttgcatgattttttcatcctttctgattaagcaatcgatgattgcgaggtttggttcacaatgttcaatggttcatttttgaaatagatcccaacaagggctttattttttgtaatgcgaatttcatcaatatagggatgcagcatgtttaacgtgaaacttttctgtataaccttttgtagtgatgtttgtaactgattatcacttatggaggatatggttttgtgcttttgattcatcaaatgagtctgttttctgaatgattcagcatcaatcatacctttggcaagtttatctatcagttgttcttgagttagcgtacttttagcttctatcactctttgttttttgaggcgttgatgaattgcattattaatttttgaatagagctgttggttttgaaagaagttctgacatgtagctaagacttgaacttctaatttttgtgcatttattcctttgaatgaacagacaaagcgagattcattcatatttttaggacaaatataatatcgcaatgtatgtttttttcttattgtcatatttgtcagtgttgagtcacaacaaggacatttgatcttttgtttcagctgattctctgaaggtatacagtgaagttgcttcttattacggattgcttgagcatgttcatatttcgttgccgaaacaataggtggtaccatattgttatattgaccatattgattgatgacacgaccacaataatttgggttcataattatatttcgtacctgataaggcttgcgggtaataagtttattatcgtcttctaaatattgtgcaatcttcttgtagccatatccttgaagataataattgaatacagctttgacggtaggtgattcatcattattaatgatgaaagtaccattttgatagtgataaccgaaaggcgcatgggtcgttatgagtttaccttgttttgccttttctctaagtccatttttgacttgttctccaatattatcggattcaagttcagccagactcatgaatatattgagttttaggcgatcaaacgctttatccatatcaaaatagccatcatgaacacttagaatatgaacatgatatttttgacagagtttcatgagttttaatgcatttttcaagttgcgatgaagtcgattcaagcgataacaacataatacgtcacattgtctttgttggatgcgttcggtgacttgttgatagcctgttcgattatctgttctgcctgattgcttatcactaatgtattggatattttgaatattgtgctttggagctaataattctattgcttgcttttgagctgggagtgattgttgtttcgttgtactttggcgcaaataaccaatggctcgtttcatagtatttcctcctttcaaagagataatatatatttatgaacgaaattatagataagcccaacaccagtcgggtgttgggcggtattattagtcatcagcgtgattgatttcttcaataaccagatcggctaatagtatgattaattcgtccatgtatatcacctcattattcatagtattaacaacaattctttagttgcatctcaaaagtagtaacgaattcgatattcttctttgagcaaatttttttaaatgaatgtaatcttcatattctccatatgcaacaatggacgtaggtttgattactttctccaaaatgtcatttattaacttgtactcctcagtgtaagtgttacttatttgacgaccttcttgtttacagcattccttcacagtatctaggggtgtgctttctaagtattcaaatctttcatcttcaatttcgtgagctagtgctactgtattcatagtacaattcctccattgatttaatatttgtgctacaacacctttaaataggtgttgtagcaaatttatttaataacatattttaagctttaaaagtcaatatcaccgtttttatcccattctcttgcttttgaaatcatgtctcgtagtattggatgttggtgttcagagataaatgataagggtatattgaatttacttttttcagatagaccaaaaataggagcgtatgatttatcaagcttaagatgataaaatacgatggtttttggtttgccttctttgtctttgacactacgttttgttgttttacgattggcgtctgactggatgtaatctttatccctcagtgcatcaatgacattatttgtatcttggaaattatgttcttttaacatatttttaaaaaccgaggcaatcattttcacctggatatgatcatcttcaagtgaaatcattccataattttcaataagcgttgataacctagtgtcgtcagaaaacttaccacgattttgtgctacaaattggacaatgacttcaattgctttatcagctaggcttcgctcactaacagaatctaaatgatagttaataagatagtcccttacagcattcaaatcaacaggtgtggcaatgacacgttccaatatacgtgctgatgttgtaatggttgcatagcgtttgaacatccgaattcctgtattgctggtttccttttctagttgagttttgaaccttaggtgctcattttggaaccatttaatgacttcttgttcacgattgagtagatattcagctactaatggcatgatatgaccataattagctgatgttgcttttttaatagtatctgcgttgtcagcgttagttgtaaaagcttcagatatttcaatggtacgtacattcaaaccatcattacgtgcactattattgaaaatactgtgttcggcagtactaattactgaggttccccagttttttagtgacttgacttctccgtgtatattagaacgttgtcttccttgaccttcggcaattgaatagagcaaaccagttgtatctttaaaggttgcagatgacagttcgtccaatacaataggtacaccatagttgttacttagatatccttcaagcgcgtttctagtgccattccatgatctaaacagcgtattactacctttagtagggttgccggttattgagactcctaaagccgctgcagttgatttacccgtgcttgaatttcccgtaaatgagaaaatcgtacctgcgaattcaacctcatgttttgtttttaaaaacgcagttactaatgaagaaataccaaacactacagcaagttcgagtaacaagtttccttttacttcatcaagatacatttgccaccagtcttcaaaagtgcctttaggttgtagatcgtactgtgtttcacaaatgatttcatccgcctgcgactgtgtaatttcttttgaaagatatggttcatctaatgaaatgacgacacctttatcagtatttaacacaccgacacccgtatacaacgatgacagaggcagtgattggcgcattaattgtagtgcattgcttaatgatttaatgtacttctcattgatgctgaagccatacatgattagtgaaggtaacttttgcgatgttaaaatatctgatgtttcaatacgttcaatattttgtccgttggaaataactagtttctcaaccccagatttggggtcaagaaacttgtttttaattaaaattggactagataagcgtatggacttttgctgatcatttttacctttcggtggtataacttcataccatgaatcttcagtaagccagtatggatattcactaaagatgatgttagtcattagttgttaccacctttccagttattttgatgattcatcggatttggtgcagttttaaggtagagcaaagatgaacctttttttccaactacaatgaatggaaggttaggtgtatattttacaaaatgtgcaaaccaacgaccaacatcttgttgaatttcagtcgagcacaaaacattagccctcacattcaaatcgtgatacataaacatggtgcctacaggtaaattaaatgcgatgcttgtaacagcacgttttagtgtataaaattctttttctttcatcataagttcctccaaataagtcttattagtcaatcaatactgtagatgcttaacacctcaatggttgattgctataataagcataaatgaagcattttaattagacgcggaacaaaaaatagggaggggggtatatatgatacctacgatagaagaaattattgacaagtatggcagtttagtagattgtctaaagtttgatatatcaggtgaggtttatgaagacttattgttattaagaagtttaagcgatttaaatgaacaccaaaagatgcatagagtttcatttatacaaaaacactttaaccctaattttgattatttgttagatgactcagaatttagaagtatgaataaaatttatagaaatttaaatactatgacgtatatcaatagtcaaaacaatgaatttaaacttaaaccatttataaatgaagaacaattaaaatcactacttgcgataaagaaagtagatgaacatttgagttatgacccatctattacctcaaaagcattagcagatataaacaagacgcaaaaaagattggttacaaagccaaatattctctataatcgatccaaaaaagaaaatgagtatgtacggttaggaggaaaaatatcatatacaaagatggagaagcattgggaatatttacataatgagattcagtattataatcttactaatcaattaattagttatgttgctttagaaaaggaatatgcatgggcttttttaaatgaattattttatttaatagaattatatttgaaggcatttaaaggacaaaagaaaactggccatgaatttgaagaaggattgaacgcatttattcaatcatatgtcattattttacttatagatataagattaccgactgttaggttatatattattaggcgtattgtggatgaatgcgaaaaagaatcagataatcaaaaaagaattaaactgatagaggaatccattaaaaagtacagatatgtaaaagaacagattgaaagatttggaaatgcgttgaaagaagaattatcaatcgcgactttgtctattgaacagaatatgttagaagctaaaattgattattataagaattactactatcctagaaaaaaaacaaagcataacaatattgagtacaacgtatcaatgttttttaaagctgtagattctttaaagaaatagtattcgacggacaatatttatagataataattaattagagaggttttaagttgtgtttagattaaaaaaatggtatttaaaacaaaaaggctatttttgccgtgtcggtgaaaagtgggacaatagtaatttatcccatgaaaatatacatagttatgtagatagagtacttgaatatgagactgaaacacgtagaaacggccaaccaactgaagaatatatattagctagtagtggggaaaaaataaatgaagatttaagaagtggtactaatgatcacaaagaaattctagaggtatttgataaatataaagtaaaagaggatataactacttatagaacggttagtcctcggatatacaaattaatggagaaaaatgctaaaaacttaaatggagtagatttgtttgaacttggaattttacacacttcattaataaaagggtacgaatcaagagaagaaggttacaaattacgggtaaaagtaaaaaaaggaacaccagctttctatgtaggtaatttaacaggcgaagaaagccattattatgaggtgattgtagttaataatttaaaattaaaaatcatatctattgaagattactatataaattgtgaagtagtataattggaatcaattctgttagttgttcataataagccaattatttttttaatgaacttattacttaaaaaccgcatcatcaactgataagcagaagcgtatcataagtagcggaggagttttttaccttgtgacttatcataaagtacgatgtttatgtaagtgattatcattatttaagcaggtttttcaaattaaataataacaagaataaaatgcacttagcgacattgaaatttattaatctagtaaactaatagatttatagaaaattttatttgcaaggggataattttgaaaagtagtattttctatctttccataatacattgtaattacaacggaggggatattgtgatgaagtgtatagataaaacgtgggttagctattataaagaattagctgataagttaacagattatcaaaataaacgttatgaattaattgaaatagtgaaggaagtatataaaaaaacgggaataaaattccctactttagcaagtgataatgtattgatggacatagatccttttacaatatttgcattatttaataaaaattccatgagagaaactaataaggtaaaaatattaacagaattagcttcggaattgaatattaagtccaaaattccgtcagtttttgacagtattccaacagtcaataatctgaatgctacatattataattttaaagattatggaaaagataatgatatagagaccttgtggaccttatttactgctgcattaaattttgcgaattatccttcagaagataataaattaaaatttatacatagttttgataagaatattactaaaacaggaaatgggaatagtaagattacgagtggtttgtactggattgcacctgaaacttttgctaactttgattcacgttcaatttggtacatttttgatacatataaactccctaaagaattgattaatgaacaacttaaaccaaaagaaaaactaacaggtcgacattatttagaattgataaatatgttaaagcaagttttgaagtgccaggaagtagagattaatgattttattgatttaagttatgagtcttggcattattcagaaatgataaatgaagctaatagaaacaaatttgattctaatatcaaagaaattgttgtcagtgaaaatgacaatataatacaaaatagaagtagaacaactaaagttataccatatggaaaacaagaattcttagatgaagtttttattgatgaaagtgattatgataggttagtacaacttttaagaagaaagcgaaatgtcattctacagggaccgcctggtgtaggaaaaacttttcttgcaaaacgtcttgcttattcattgattggcagtaagtgtaaagaacgaattaaattaattcaatttcatcaaagttattcatatgaagattttattatgggatatagacctactagttcaggttttgaactgactacagggacgttctatgatttttgtaagaaagctgataaagaccgcgataatgaatattttttaattattgatgaaattaataggggtaatctgagtaaaatttttggtgaattatttatgttgattgaaagtgataaaagagatgaagaactaatattactttatagcggtgagagattttctgtacctagaaatatttatattgtgggaatgatgaatacagcagatcgtagtttagcaattttagattatgcattacgcagacgctttgcgttttataatatgcaaccggcgtttcatacaactaaattcaaaaaacttcttaaagcaattaataatactgaattagagtcagtaattaattgtattgaaggattaaataaagagattgttcaagacgatatgttaggtaatggctttgttattggtcatagttattttagcaatattgaatgtatcgacaaagatgagctttctaatattatagaatttgagattattcctatgttagaagaatattggtttgatgaaccttcaaaaataaatgtatggtctgaaaagttaaggaattcaataaataatgattaatattaaaaatatttattatatgttatcttatgcatttacagtacttaacaaaaaaggctatcagaagttagcaacagaacaatttgaaaatatatttgatttatattcagctattcttataaaaggtatatcaagtcagttaaatagtggacttcatcatgaatatatagaacagacagattctctaaaagttattaggggaaaagttgatgttaagaattctatacaaggcttaggagttttaagtcaacgtattaattgtatttatgatgaattttcattaaatacatacatgaacaagattttaaaaactacaatgaaatgtttaataaaaacagatatttctagaaagaataagataaagctccgaaagttattagttcattttaataatgttgatactttagattatagaaatattcaatggtatcattcgtttgatcgaaataatcagacgtataaaatgttaatatctatatgctatttaatttttcaaggagtaatacaaactgaaagcaagggacaaaatgatcttatggtatttgtagacgaacaacaaatatctcggctatatgaaaaatttattctagagtactataaaaaagaatttccagagcttgttgtaacatcatcaaatattcaatggtcattagataatgatgataacgtgaatatgcttcctgtaatgagaagtgatattatgttgagatataaagataaatgtctaattatcgatgcaaaattttataaaaatacattacacaattattatgatactaaaaagatccattcaactaacctgtatcaaatatttacttacgtgaaaaaccaacaattaaatttaaaaaagaaagcaatacaggtctcaggaatgttgttatatgctaaaacagacgaaaatattgttttgaacgataaatttcatatgagtggtagtcaaatcattattaagacattagatttgaactgtaattttactattattaaaaaacagttgaatgggatagttaatgatatatttttactaaaataatattaaagatttaaaattataaagatattaattatgattagtggtttcaaaatgttgttttttagaggtttaagattgtcataaatttagttttatttgttctcatgttcaagtttctttatatcaacttttattttagtaaaccttaaagagtagcaacttcaaaattcgcatttatatctaaaaataattttaaaatagacatgtttaaacaatcaaaagtgtgcattgttaaatcatcattttcaaaagtttattagcgaaatagatacgttagtcttaaaagtgattagtcgtataacagtaattgcaatttgtgaaagttaattttatagttgtatgaccaatttttaaataagattattaggtaaggcataatagccctgttaagtgataaacgatacaaaagtgatatataggaggcgatatcatgattactattgattcaaagattaataaacaaatcgctaaaaacctttcacttgaaggtatgtatgttacacgagaacagcaaatacaaattcttcatgcaattaataatgagaaagaaattacaaatgaacttattcgtaaaatcgcttttaaataatgaaatatatagcaacttttcaaaaggcattaaactatcttgaaaagttgcttattaaataataattgctcaaataaaaaacatataaatgctcttaccaaaaaaatattcgtaactaaaatattacaaagtaattaaaaagtgtgattacccaaaaatcctttttttattcagattgccttaatattgctcctaaatgttgctgtgcagtagtaaataatacgaatgtaattaacttgtcaatagcggttcaaaaatgctgttttatggcggtttgaaaatgtcgttttttagcggtttaagattgtcatatatttaatgatttttcggttttataatcttttaatcgatttgattctccagtaattttaaatacttttgaatggtgaacaaaacgatcaattatagctgctgatgcaatcttattactaaatgacaattcccaactcgaaaatgaaatattacttgtaaaattaaaaagtattaaacaaaaaacgtaattatgctactgaaatagctcaaaagaattatgaaattcgaaaaaagaattgcaatatgccataatgctatctcctttctaaattaactcatcgcttcataaatacatttattcaaatttgtaaatcaattaataccaatgttgtatcattataatctatcatttattccttacctctataaaaaatgtctcaaaaaacatataaacaaatataaccattcaatcattaaagcataaagaacgctacttcatttccattaatatttatatagaaagtaaagtagcgttattctaacttatttagtttataccataatataatgtctctagaataaaacgctagtgattatggttttcttcaatttgataaaattcaatcgcattgcctcttaatataccattaatcgtgtcagggtcaatattactgtttttaatatagtctacgccgcgtgtatatttttcatcttggaagtaagggaagtctgaccccatcataaatttatccttaccaaatgtctcaatagagttaatcaatgaaggttcgtggaagtttgctgtatcataccaaaattgtcgatttaatacttcataaggatcaatattaaaggcattccaatcttcataattgtctttaatacgagtcatgaagaatggtaaagcgccacctaaatgtgaaatatggaatttaatatttggatatttttgcggaatttcatttttaatcaattgtaatgtaataaaggtagactctaacggtgcaccaataacccattctaattgatagtcattgactaacggactttgagcgccacaacctgttggatgaatataaattgtagcattgagctcattcatcgctgcaaagaaaggttcaaattgtttatcagcaacagagaccttatcttttactatagttggaatggcaatgcccacaaattcatcttttttcaaaagggcttgggcttcttcaatagcttgatcgacataaggtagtgagacagcaccatatgccaagaaacgatccggatattgttgaactaatctttcatataagtcattaatttcttgagcactttggtgagcttcttctttagtaccccattgtggagattgtggtgtcgcagaaataatttgtaaatctacgccagcatcgtccatcattttgaagcgtttctctaaatcttctttagacgcagattgattaatccctttagcaacttcagtaccttgactacctaatttgccaagtttgtctaaatagtcttcattccataaatgtgcgtgtgtatcaatcgcttttgtttcagtcatattatcccctccattaaaaattgtcattcataatttgcttattgccaatagcttatttattacgagttaagcttaacacttctagtaagcttaatacatttaaaaagaaaaatttagaagcagcttgtgcacctttataaccatgcccagctttataatggttataaatagctgtacccataacaatattaatcataatcgtaccaacaactactaattttttccctaatttaccgaaaatagaagtaaataaaagaagtgaaccaatcatttcgaaagcgccagctaatctcattgatctacgagataaaccaaagccttgttcgaattgttgagccatttcatcactattttgtacttttggtaaactgcttttaaaaattttactacctacatatgtgttaatgacgtgtcttaataacattttaaaatcctccaaataattaatgtttgcgaataaagaatgcaatgatagtacctataaaggcaatcaatgcgacgacatagaatgtaatatctagaccatgaataagtccttgactaccacttaatgaagaggtttttcctaatcctgtcatcaatgtgaccaagataccagtacctattgcagctgacacttgtctaatcgtattattcatggctgtaccatgtgcaatgtattgacgtggcaaagcatttaaagcttgagttgtcattggcgtcatgatcatagcattacctaacatggtaactgaaaatgaaataatcacatatagttgtgttgtattttgactaaattgagccattaataatgcaccaatcataatcgttagcatccccataatactcaagatacgtccaccaattttatcgaataatttaccagtgacaggcgataacagtcccataattaacccaccaggtaataaaataagtcctgactctaacggggaccatttcatcatcgtttgcatataaattggtaagattgttaaattccctataaataacatgaacattagtacaattaaaatcattgccactgaaaagtcgttatatttaaatactctaaactctaacaatggcgattccagttttaattgtcggaaaataaataccgttaatataactatggcagcaataatagttatattaaccattggatgtgaccaacctaagtttcctgctgtactaaaaccatatagtaagccaccaaagctaaccgtcgataaaataacggatagtttgtctaagtttggtttacttagttccgttatatttggcaatgatagatacccgaatacaaaatcaatcatacctattagtaatacgactaggaacagatagcgccaatcgaaaatattgacgaaccaaccagctgcagttggtccaatcgcgggtgcaaaacctattacaagaccgaacattcccattgccattccacgtttttcaggtggaaacataatgaaaaggagtgtctgtgtgagtggcatcagtataccagcacctaaggcttgaatactacgtcctaataataacattggaaaattgattcctagcatacaaataaatgaaccaatcattaaaaagcatgttgcattaaaaaataaagaacgtaatgtaaaacgttcaattaaaaatgctgtgataggaatcataatcccattgactagcataaaaattgtcgtgagccattgtgctgtactacttgataccgtaaaatctttcataatttctggaagtatcgtagtcatcaaagtttgattcagcacaccaacaaaagcaccaatcattacgacagctataacacggttccgttgtttcaaatctatattaaaggcatatacattcctcaaattttgacgcctccctctcttttaagtggaacctactatcatttattttatacggaatacgttccgtttgtcaatttaataactcaagggtatgataataggtatctgataaaatgaaaaacgcaataatgaaggaggtagtttatataaattttgaaggattagaacaatatttaaatggtgataatacaagatataacacgcttagtttagagacgcttaattattatttaaaacaatatgtgttaactgtcccgttcaaaaatatggatgttcaaaatgggatgaaagtttctgcagaagtaaaagatatttaaaataatgtagtgaaccatcaacacggtgacttttattatgaaatgaataatttctttaacgtgtattttgaatataaaggatttactgtaaatatagtttcttcaactatccatacccatggtgatggaaaaagcttaaaaggttctcacgtgtctttaatcatacctattgatggcgttgattatgttacaggtgctgactttggagacttgccatttagtgtcatgccaattgttccaaaagataatagtccagtcattcatgatatgaacggtgatttccatgcaatttacgtcaacgattatttattttatgttcgaaaaatggggaaagataatgacaataacttggatcacactatgaagtggaattaacacctcgtcatattcatgactttgtttacaatattgaatataatgaaattaatcctaatgctatttttgtgaaacgctagttagtaacaatgattaaatctttttggtcgtgctacaatgttacaaaataatataactttaactaagcaacaaaagaaagaataatatgatgtaacacctgagaatgatagacaatttttagaagaagcatttaatttagatgttaaaattgatagattagaaagttaaaaacaacgttaaaaagaggaatataatggaaaaaaatcaacgaaaaaaacgcagtgatgccgaatataaccaacagattatcttaactacaatggaagatttactagaacagggtgaagatataagtactaagaaaatgtcagatattgctaaaatatcaggtgttggagttggtacattatatcgtcattttgaaagtaaaacattgttgtgtcaggctattatggataaaaaagtcgatcaaatgtttatagaaatagaagatattttagcggaaaatacacagtggcccgtgcgagataaaatcaatgttatattaacaaagtatctagatttaaaagaagcaaatttcacaacattaaattttatagaaaaatccagttcacactctagttctgtaattaatattccattctttgagcgactaaaaaacttattaattcaacaattcgaaaatgttcattccatagcagacttggattttaaacttaatctaatgctcaatgcattttcttcagatttctattattttgtaaaacataaccaaaaattaacaaaacaacaatttttagacaaattactagatttatatctaagataatatgttctgaaaaatagaagtattttttgaatcactaaataacgcgctattaaatggcttcgctatgcccgtctaacacattagtgtaaaattttataaattgaatttttgatgacgggtcccttcctagggtgctctctcagacaccccaaccggcacattattgtaagttgacttttcgataatattaaagatttaaaataataaagctattaattatgattagtggtttcaaaatgctatttttagaggtttaagattgccatgaatttcgttttatttgttctcatgttcaggtttctttatatcaacttttattttagtaaaccaaaaagagtagcaacttcaaaattcgcatttatatctaaagataattttaaaatgcacatgtttaaagaatcaaaagtgtgcattgttaaatcatcattttcaactcataaggattattaacagagagaagtgacttattttggaatataaatcttacaacaaaatgagtaataatattttatctatcttgttgagtgaaaaaaatttcgataataaaatggtagtctcaacaggtagttacattttgtctgagttgccatgtattgttgcctataaaaataatgatatcgtggggctactaacgtataaagtttatgatgagtatattgaaatcatttctttagatagttttgtagagaacaagggtattggtagtcatttacttaattatgctgaaataattgcctcagatatgagtaaaagaagtatcagtgttattactacaaatgaaaatattaaggcactctatttctatcaaaaaaataaatatagaatcacagacgttatttttgatgctgtaacagaagctaggaaaataaagccgtcgattcctgaaatgggtgaaaatggcattgaaattagagatgaaattgtattgaaaaaatgtttataacgtataaatatacgttgttttaaatcaccctagttcataccaaaaagactttaacacaaacaaaaaggaggaaacttaaattcctcctcaacctttattactcatactataattctagtttaacgtcttcgtccatttgggcttcaaattcatctagtagtgctcgtgcttctgcaattgattgtgtgttcatcaattgatggcgaagttcactagcgcctcttatgccacgcacatagattttaaagaatctacgtaaactcttgaattgtcgtatttcatctttttcatatttgttaaataatgatagatgcaatctcaacagatctaatagttctttgcatgtgtgttcgcgtggttctttttcaaaagcgaatggattatggaaaatacctctaccaatcatgacgccatcaatgccatatttttctgcaagttcaagtcctgtttttctatcgggaatatcaccgttaattgttaacaatgtgtttggtgcaatttcgtcacgtaaatttttaatagcttcgattaattcccaatgtgcatctactttactcatttctttacgtgtacgaagatgaatagataaatttgcaatgtcttgttcgaagacatgcttcaaccaatctttccattcatcgatttcatagtaaccaaggcgtgttttaacacttaccggaagtccacctgctttagttgcttgaataatttcggcagcgacgtcaggtcttaagattaagccggaacccttaccctttttagcaacatttgctacaggacatcccatatttaagtcaatgcctttaaagcccattttagctaattgaatactcgtttcacggaactgttctggcttatctccccatatgtgagcgaccaccggctgttcatcttcgctaaaagttaagcgtccgcgcacactatgtatgccttcagggtggcaaaagctctcggtatttgtaaattcagtgaaaaacacatccggtctagctgcttcacttacaacgtgtcgaaagacgatatctgtaacgtcttccattggcgccaaaataaaaaatggacgtggtaattcactccaaaaattttccttcataatatatttataccctctttataattagtatctcgattttttatgcatgatgatattaccacaaaagacgaacttatacaaaaggaattttagttgatacaaccatttgaaagggaagtctacgagtagtctaaaatgaatgttgtggtaagttgatcaatatacaaatcaaggattatcgcgttaaattgttcattattaatgatacactacttattattatgattcagaattttctttggctacatatacagtaatgtgatttatacgttatcttataacaaaggcaaatttataaaggtgatattatggaagatttaaagcaatctttaaaaggtttaggttggtatgacttttttttatagtacctatgtttctactattcgtgtatctgccgaattataattttataactatatttattaacattgttatcattattttcttttccataggtttgattttaactacgcatataattatagataaaattaagagcaactcgaaatgattcattaacacgaatgtgattaaacataaaactgaaggagcgattacaatggcgactgagaaagatgtaaatgatttatttttaaatcatgtgaattcaaatgctgttaaaactagaaagatgatgggagaatatattgtttattatgatggtgtggttataggtggtttgtatgataatagattattggtcaaggcgactaaaagtgcacgtcatcaatttcaagataatgcattagtatcgccgtatcctggtgctaaagaaatgatattaattccagactttgccgaagcaacaaatattactaatttatttgagtgcataaaaaatgatttgaaaaactaatcataaattgccatgctcaactattttgaaaagcatcatttccatattatcaaattattgagtatctcgatttattgttatacacaaacagtatttttgttatcatagagcttataaatataataaattgaataagtaactttacaaaactagaatgattcaattcaatcacaattatttgaaaatagaggtgagcaggtgaacgatatgttaattagtctcgtaatcccagtttttgctttgttagttattggtggtattatttggatgattatagaaggtatagtacatatttcaaaaaagaataaagcaattgataacttttttaacaaagttaataaagtaagtgagacatataaattcgctactacttttttatttctaatcttggctacggctggtatttctcaattttatctatattatatagtatcagagtttctttttttgctggttatatttacctttggtattgcaggtatcatttttttaatgccatatggcttatgtttcctaccactttataaacaaaaaaagaaaaaacagacatttaaaaaatacatggcttacactacgattggtttgtcaatttatctaggcttatctctagttttggttcacactacgaaaatttatatggacgaaggtggcgtaagatactattacggtagttttgtaatgaaacaagcgggcggttatgcttatttagctttagcagtactttcaacgttgttaattgttgcgaaaaaagctacaaataaaaataaaaaaatcgaaaccgtcgacaatacaaatataacggaaagataattaagagagtgctcattcaggagtgctctttttttgatgttcaaatttagttggaaatgaaggcatagaagaaatttttatagtcatttattggataatgaattatggtcatatcgattaattttattagtgaggattttacaaacatttgttgaataaatatggtaatgataatatatgaatatttttgaaaaaacactaatatgattaaattatttgttaaaatagcattaagtaaaaaacaaacagggaacaaggtgggatttcatgagtcaattgctaaatgatacgttatcggcttggttgttaattgaatctttaagtccaggagaagtaaattttacagcggaagatatactctcagctgaaaattttaaaaatggtgcaaagcaagcgcaacttcaaagctttgatgaatattttgaaatatggaatgatgaacgctttattatatcagaagaaaaatcagagattggcgaaatcatttttaaattttacagacactgtttccgctataatgaaattaatttgaaaattcaggatatttttgatgattattcagatattcataatccaaatgggacacactgttatggttacacatttaatatagataaacacggtcaagtgatagttgattctatacatattccgatgattatgagtgcattgaaagaaattgaaaagaataaaaatgctaatatagaagaaaaatttaatgattctgttgaaaaatttgttcaaaaagtaaaagaaattttagcggatgaaccaattaatgaatttaaattgaagaagatggacatagcttatgatgagtatttttctgtattaaattcaaagaaagatggattatttgcacattatgtagcaatagaatatgtgaaagatagtgatttaccacagccagaatttaatagcttcttcataagtgatattgagaaagcaagaaaatctcccaatcaaactttaattgattacattgagggtgtagaagaaagtaagcgcatagaagtggatgaaaataaagaaatgttcgacaaatttttacatccttcacgtttgcctgatggacgctggccatcacagactgagtttagattgtcattaatgcaacaacttgctgtaaaccaaattacgagtggtaatgaaaggataagttcagttaatgggccaccagggacaggtaagactactttattaaaagatatatttgcgcatctagtagttgaaagaggtaaagagttagccaaactaaataatcctaaagatgcatttgtcaaaacaaaaactcatgaaacagatgataaatatgtctatttacttaaggaatctattgctaaatataagatggtagtcgcatctagtaataatggagctgttgaaaatatatctaaagatttaccgaaaattgaagaaattataagaaatcccgaaaaatgtaaattccctaaatatgaacagaattatgcaaatttagcacatgaattaaaagattttgctgaaatagctgaagatttgattggtgaaagtgcctggggcttattttctggagtatttggtaaaagtactaatattaaccaagtattgagtcatatgttaaaacaagatgcgaatgatattggctttgctaaattactacaaaatgagaataatcgtatgagttataacgagttaatgagtgaatggcaatcacatcaacgtgcatttttagaagagttgaggcatgttgaaatgttaaaagaagaatctattagagcctatgatgtttataaaaattgtgagtcttactctaaggttgaacatgaactaaatagcaaaaaaatgaatgttaaggaaaagttgaatcatttagaaattcaaatatcttgtgacaataaagaaattgaagatttggatgatcgaattaattataatacaaagcaactcgaaactttaaatgagttaattaaatccatcagagatagtaacaaagggtttgttaacaagctgaaggcgatatttaattcagaagaagatgaaagatataaaaaacataatgcagagaagcaacaattattaggacaacagatagagttagagaaatgtaaaaaaattaaaaatgaagaccttgttagcaaactaaaagaaaaagagaaattaattaaacaattaactaaagtacagttgcaattagacgagttaaattcacagttacaagagttagaagcatatcgtattgagtcaaaaattacaattccagaaaaagatttttggagtgacaacaattatgatgagcgccaagttactaatttgtggacgagtgacgaacttcaatacagacgtgccatgctctttttaagagcaatgatattgcataaattattattgattgctaataatacaactatttattatgcgattaatgattttaaaagtagaaggaaattaattgatgcaaatccagataaagtacacaacgcatggaatgtgatgcatttaatatttccagtagttagtacgacgtttgcaagctttaaatctatgtatgggggcataccaagagatttcatagactacttatttattgatgaagcaggacaagcaatacctcaagcagctgtgggagcattatttagatcgaaaaaagttgtagccgtaggtgatccgattcaaattgaacctgttgttactttagaaagccatttaattgataatattcgtaaaaattataatgttccggaatatctagtttctaaagaagcttctgtgcagtctgtcgctgacaacgctaatcaatatggcttttggaaatctgatgctactgatagtaatcaaaaaacgtggataggcatacctttatgggtgcacagacgatgtttaaaacccatgttcacgatagctaatcaaattgcttataataataaaatggtgctacctagtaatattacaaacgtaggtaagaccggttggtatgacgttaaaggaaactcagtacaaaaacaatttgtgaaagagcatggcgaaaaagtattggaattactagctaatgattggtttgaagcgattaaggaaggtaaaaatgagccgagttcatttgtaatatcaccattttcagcagtacaaaaacaggttaaacgtatattaaagcaacaactaccgactagaattgatattgaacgtacaaaaattaatcaatgggtcgataaatccattggtactgttcatacttttcaaggtaaagaggctcaaaaggtgtattttgtaataggtactgataatactcaagatggtgctgtgaactggtcatgcgaaaaaccaaacttgttaaatgttgcagtgacaagggctaaaaaagagttttatgtaattggtgacatgcaaagaatacagtcgaaaccattttatgagaccatttttaaagaaagaaatgtaaaatgaaatgacagcatttctataggctaatcaagtgatacttaattatcgcgcaatttatacattttaaaaggagtaaaattgaataatgaagaaatttaacaactggatattaaatgcaataagtggatctcaaacagacaagaatgaaacaactgaagaattaaaaggggcaaaatttattattttatatgcatattcaatgctcgttttgcttgcgttagtaatttctaacatattcattcacattttggagcctaaactatcaatcaccactcaaatcatcatcgttttgattttaattgaatcactaattggactgcgtttcttgaaagagtacgatgttaagcgtggcaaagataaagaaaataagaaaaatagtaaggatttcgttaaactaaaatcaattttagtagcaattttatttacatcattggcgctgacagcaggcactgtagctgatatatacggtttcactgacttaggaaatactagaagtgatttaatcgtttggagcataggtggtattatatttggcctcgtatgttacacaatggaagataaaaaataacgataaggagctggcgattataaagctagctccttttttaacttatatatgtaaagaactattctaaggatttttaatcatgtgtcaataattcctataatacattattaaaacatcaattaaataagttttaaaattttacacatatttttatttaaaaaagatgtataattaatgtattaaatatagaaagaagttgatattatgaaaaagtgtattaagactttgtttttaagtatcattttagtagtgatgggtggttggtatcattcagcacatgcgttagattcgttgagtaaaagtccagaaaattggatgagtaaacttgatgaaagcaaacatttaactgagattaatatgccaggctcacatgatagtggctcattcactttaactgacccggtaaaatcagtttgggcaaagactcaagataaagattaccttactcaaatgaagtcaggagtcaggttttttgatattagaggtagagcaagtgctgataatatgatttcagttcatcacggcatggtttatctgcatcatgaattaggaaaatttctcgatgatgctaaatattatttgagtgcctatccaaacgaaacaattgtgatgtctatgaaaaaggactacgatagcgattctaaagttacgaagacatttgaagagatttttagagaatattattataataacccgcaatatcagaatcttttttacacaggaagtaacgcgaaccctactttaaaagagacaaaaggtaaaattgtcctattcaatagaatgggtggtacatacataaaaagtggttatggtgctgacacgtctggcattcaatgggcagataacgcgacatttgaaacgaaaattaataatggtagcttaaatttacaagtacaagatgagtataaagattactatgataaaaaagttgaagctgttaaaaatttattggctaaagcaaaaacggatagtaacaaagacaatgtatatgtgaatttcttaagtgtagcgtctggaggcagcgcatttaatagtacttataactatgcatcacatataaatcctgaaattgcaaaaacgattaaagcaaatgggaaagctagaacgggttggctgattgttgactatgcagggtatccgtggcctggatatgatgatatcgtaagcgaaattatagatagtaataaataaggattcaataatgatattaagacgagtatgaaaatagttagattctacttattttcactactcgtttttattttgaaaataagtaatgattcaacaatattataaattgaacagattgtttgtggaatttttgataatattaaagtgaaaaagtgttataaattgatattaatatgtaatttgcaaaagtaaatcattttaaaaagaagagagttgtaagatgatgaaacgattaaacaaattagtgctaggtattaatcttctgtttttagtcattagtattactgctggttgcggcatgggtaaagaagcggaaattaagaaaagttttgagaagacattgagtatgtatccgattaaaaatctagaggatttatacgataaagaaggttattgtgatgatcaatttgataaaaatgataaaggtacatggattgttcgttcgtcaatgtcgattcaacctaatggaaaagatatgaacgtaaaaggtatggttttatatatgaatagaaattcaagaacaacaaatggctattactatgttgatgttatagaaagacaagataaaggtatacatcgtgataacgaaaaaaagtatcctgttaaaatggtcgataataaaatcattccaacaaaagatatcaaagatgagaacataaaaaaagaaatcgagaactttaagttcttcgcgcaatatggcagctttaaagatttgtcgaagtacaaagatggagatatttcatataatccagaggtgccgagttattcagccaaatatcaattaacgaatgatgattataatgtaaagcaattacgtaaaagatatgatataccaacaaataaagcaccaaagttattgttgaaaggtacaggtaatttaaaaggctcatcagttggatataaagatattgaatttacgtttgtagagaaaaaaggagaaaatatttactttagtgatagcctacatcttgaaccaagtgaggataaataatcatccacacacacgattcaatatgaaattcaaatatgttgctgtaaaataatgtaaaataaacgtattcatattactgaattgagggatagtatgcaacgtgattatttaattcgagtagaaactgagagtatgttagatttcaaaaggctcaatggtttaatgattggttttgttattaaaggtgaggcacacatttatgatgaaaataatatgacgcaatgcaacagtggcgacattttcatcattaaccaccgcgacttgtatcgatttcaacttcaacttcaacaagatggcatcatatgttatatccaattccaaatgaaatatttagcagacaagtttgatgatgtgcattgtctatattttcacttaacagatgcgaccacaacaaaaaatatacatcaactgagaaatataatggcaagactggtttcaacacatattcgacataatgagttgtctaaattgactgagcaacaacttgtcattcagttgcttatgcatatgattcattatgttccgcgtacatatcattcgaaccaaagtatcttaaatgatgataaagtgaatcaagtatgcgactatatcgagttacattttcatgaagacttaagcctttcggaattaagcgaatatgttgggtggtcagagagccatctgtctaaaaagtttgcagaatcgctaggtgtaggattccagcatttcttaaatacgacgcgaattgagcatgcgaaactcgatttgacatacacagatgaaacgattactgatattgcattgcaaaatggcttttcaagtgcagcgagctttgcgagaacatttaaacactttacgcatcaaacgcctaaacaatatcgaggtgatcgtccagcaatcactgaaaatcagcaatcggcacaacataattatcacgaccgtgaattgatattacttttaaatgactacattgaagaaatgaatcatttcattgaagatattgaaaaggtgaactataaagagattacctttcaaccaaccaatcaccaactaaatcaatttaatcatattattcaagtgggctatttgaggaatttgctcaatacacagtatcaatcacagttgcttacatgtcatagtgattttcaagtcaatgaagtattagcatatgatgtgatgccatatattatgaaaaagctcaatgcgccattcacgtatgatgcagaaatttcgaatatattttatgatattgatttgtgtttagactttttattagatcataattttagtctaaccatgcatttgaatcagtatgactcacgagattatatcgatgcattcaaagtatttatccatcacgttgccctgcatgtcagtcatagaaaagatttgaagttcaacttgtatgtgacgacattgcacaattctttgattgaaatgattgattattttaaagcattattccccaatggtggcttgtacgttcacttagatcaagctacggaaagacatctaccattgttgaaacgacttgagccacacatcgaccattttgtatttgatgctaattcaaatgatgctgttgattttaataaaatgaatgatgatgaatttaaaaccgcgagtcaaatgattattaataaaacgaattaccttatcgacttaatgcatcgtcatcacctaaagcgtccactcattttactcaattggaatacattgacgggtgatacatttattacaaacggcgaatattttagaggtggtatcatcattgagcaattattaaaattaagctcaaaggtagaggggatcgggtattggttgaattatgatttgcacgtcagtcattgtaaaaatgaacgggattatatgaattctattgaactgtttcatcaatataatggaaaacgtccggtctatttcacggcattgttatttaataaattaacaagcaatattttatattctgatgatacatgtattgtcacgggaactgattcaaattttcaaatattgttatatgatgcaaagcattttaatccatacttagcgttggacaatcaaatgaatatgcgtgcgacggaaatgattcatttgaacataaatgccctagaagaaggtatatataagattaaacattttaccttagataaagaaaatggtgcattatttaatctttggcgaaaacatcatacgatacatggcatggacaaggactctatagattacgttaatcgaatgagttttccaaaattagaagtgtacgatatagatgtgacggatacgctggcattaaacattaaaatgattacgaatgggattcacttaattgaagtaaaacgttacccaagttcataaaatgatcacaaatcgcaaattttgttatacataatttgtgattttttgtattcaaagttaaaattgcaaaaaattaatggttaacatctctgttgttggcaatataaataatgatcaatcatatatgatgtaactaaggagatgaatgatatgaatcaacaattaattgaagctttaaaatcaaaagaagacaaaatgattgagatcagacgttatttacatcagcatccagaattatcttttcatgaggatgaaacggcgaaatacatcgctgaattttacaaaggtaaagatgtagaagtagaaacgaatgtcggaccacgtggaattaaagtaacgattgattcagggaaacctggtaaaacattagcaatccgtgcagactttgatgcattacccattactgaagatacaggattatcttttgcatcacaaaataaaggtgttatgcacgcatgtggtcacgatgcacatacagcatacatgcttgtattagcagagacgcttgccgaaatgaaagatagttttacaggaaaagtcgttgtgatacatcaaccagctgaagaagtaccaccaggtggtgctaaagcaatgattgaaaatggtgtattagacgctgttgatcatgtattaggtgtacacgtcatgagcacaatggaaacaggtaatgtgtattacagacctggttatgttcaaacaggacgcgcattcttcaaattgaaagttcaaggtaaaggtggtcatggttcatcaccacatatggccaatgatgccattgttgcaggtagctacttcgtcacagcgttacaaacagttgtatctagacgactaagtccatttgaaaccggtgttgtcacaatcggttcatttgacggtaaaggtcaattcaatgttattaaagatgttgttgaaattgaaggtgatgtacgtggattaacagatgctacaaaagcaacaattgaaaaagaaattaaacgtttatcaaaaggattagaagcattgtatggtgtaacttgcacattagaatataacgatgattatcctgcattatataatgatccagagtttactgagtacgtggctaagacgctaaaagaagcagaccttgaatttggtgtcgaaatatgtgaaccacaaccaccttcagaagactttgcatactatgctaaggaacgaccaagtgcctttatttatacaggtgcagctgtggaagatggtgaaatttacccacatcatcatcctaaatttaagatttcagaaaaatcattacttatttcggcagaagctgtagggacagttgttttagattaccttaaaggagataactaacatgaatgaaacgtatcgcgggggcaacaagttaatcttaggtattgtattaggtgttattacattttggttgtttgcacaatcacttgtaaatgttgtgccaaatttacaacaaagttttggtgcagacatgggaacaattagtattgcggtaagtctaaccgcactattttcaggcatgtttgttgttggagcaggcggcctagcagataaaattggacgcgtgaaaatgacaaatatcggcttattattaagtattattggttcagcattaattattattacaaatttaccagcattgctaattttaggccgtattatacaaggcgtatcagcagcgtgtattatgccttccacattggccattatgaaaacttattatgagggtgctgaacgtcagcgtgccttaagctattggtctatcggttcttggggtggaagtggtatctgttcactcttcggtggggcagttgcgacaactatgggttggagatggattttcatcttctcaatcatcgttgccgtactttcaatgttactcatcaaagggacgcctgaaacgaaatcagaagttaccaatacacataaatttgacgttgcaggtctaattgttctagtagttatgttattaagtttaaacgttgtcattactaaaggtgcagcacttggttatacatcattatggttctttggtttgattgcaatcgtaattgtagcattctttattttcttaaatgttgagaaaaaagtagataatccgcttattgattttaaattatttgaaaataaaccatatacaggtgcaacgatttcgaacttcttattaaacggtgttgcaggtacattaattgtagcgaatacattcgtacaacaaggtttaggttatacagcattgcaggcaggatacttatcaatcacttatttaatcatggtgttattgatgattagagttggtgaaaaattattacaaaaaatgggttctaagcgaccaatgttattaggtacattcattgtgatcattggtattgcacttatttcattagtattcttaccaggcatattttatgttatcagttgtgtcgtaggatatttatgttttggactaggcttaggtatttatgcaacaccttctacagatacagctatttcaaatgcaccgttagataaagttggcgttgcttcaggtatttataaaatggcttcatcacttggtggtgcattcggtgtcgcaattagtggtgcagtatatgccggtgcagttgctgcaacgagcattcatacaggtgcgatgattgcactttgggttaacgtattaatgggaatcatggcatttatcgcaattttatttgcgattcctaatgatgataaacgtgtcaaagatgcgaaataataacgatgacatgcccagtgttttgataatgatttaaatgaaaataaagcaaattaaatgaggaaatgtatagagcagtgcatatagataaatctatgattggattaacactaatataaatataaataaaaaaccatccacttaaacttttgataagttaggtggatggttatttattgcgttgttctaaaaatttggacatttatatggaaagaactatatataatgtgaaggttatggcaattcgcttcaatgaaggcgacgtgtaaaagtgtatattaaacgtttcggggtcagactccgagaacagtgtccgtcatgcttaccgcatactaatgaagcattattatatcagtggttctagccgatttaagataataaattttgctaaacaaaaaagccaacccatgaatgttggattggctttttacatgcatctgaatctctaattttaaaaaatatgaatataaataagacattaaaaattaaatttcagttgttgcaatttcttcatctgtaggtacatcatcgttaagaccaacaagtgcttcagaaacatttcgtgaatgataaccgatacgttcaagaacaccaatcatatcgatatatagtaatccgccttttgttgtacattcaccacgattaaggcgtttaatatgacctttgcgtagtttatgttcaatattaaatgattctctactacgctctacaatttcatcttttttcgttttgtcataaacatctaacatgtcaatggctttatcaaatgactcagcaacatggttgaataatttatccataccgcgttgtgcatcttctgtaatgcgaatatcttcatcatgttggcgttttaattgagcgacatactcttctgttagctctgctacttttaaaatagagcgattgacatcaaacataactgctaaacgctcaacgtctgccttcgtaatggcttttgtagaaattctaactaaataatttcgaatactatcattgattgtttcaacagcttgatgcttttgttcaagctttttgattaattttttgtcgtcttttgtaatttcgcgaatgtcttcaaacattgataagacaatctgacccacattttgtaattctttttgagtttcttgtaatgcaacaccaggtgcgtgataaacaagatctttgtttaagtgctgaggtttatagtcatcagcaatatctttacctgggacaagctttgtaactatccatgctaaacctgctacaaatggtaattgaatcaaagtatttgttatgttgaagataccatgtgatactgcaatcgtcatcgctggttttaagtgccatacatcttgtaacaaactaatcaaatgaatcacaactggcaagaaaattgtgaagataattaccccgattaagttaaagatgacgtgtacaagcgccgcacgttttgcagcgattgagccggctaaactagctaagatagctgtaatcgttgtaccaatattatcgcctagtaacacagggattgctgcgtttaagctaattaaatcttgttgataaaattcttgtaaaataccaatcgtcgcacttgaactttgaactagtgctgttaaccctgcgccgacaatgacagcaagtattggatttgtagacatatcaagcattaattgcttaaatccatctaatgatgctaaaggtttaacggcatcacccataaattctagaccgaagaatagagaaccgaaaccgaatagtatgcggccaatgttattgattttagagcgcttaaagaaaaagattaaaaatgcacctaatgctaaaattggcattgcatattcgcctaaatctataccgataataaatgctgttaccgttgttccgatattagcacccattatcactccaatggcttgttttaacgtcataaatccagctgttaccagtccgattgtgataactgtcgtacctgaactactttgtattaaaatagttacaacgatacctgcaataacacctaatactggatttgatgtaaatttgtttaaaatatctcgtagcctgtctcctgctgatgcttgaagtccgtctcccatgatttttaagccgtaaaggaaaatacctaaaccacctaaaaaggagaaaatgacttctgtaaccgacatttccattatttcacctcaaataagctttatattttgattatcgcttataattgtaaatttaatgttaagattaggtaaaattatttaacaatatatgttatttgtatatgacttgtaaaatatcgtcacttattatgtaaattttcagtgtgaaatggcaggtttgtaatcacttgtttaacaaaatgatgcaatcaatcatgcaattatgtgtcatcaaaaaaatcatgtgagtgggataatgaaataaagtttgtgaacatatgatttctatcccactccatgatttgaaatcaccaaataaaaatctattaatggttttcgttataacaatttgtgctcttttaataatgactcaatgtacgtaccttttatctttttaaggaatcctgctaatgcgagtttttgcattttcgaatctttagtaatctcgcgcaaatcttgatggtcattcagttcgtatacggcatccattaagacgcgaagatcaaatgtactattgatgacctctggaataccacgatctatatttagtaattgataaacagcttccatggcagtacgaaccgaatattctgttgtaaatacagtatctcgctctgtttctgcaaagttaccaataaatgctaaattttgtgattgatgcgggacgactaaaggtctgtcgccgatagcacgcgtcatgaaataagaggtaatatatggcatataaacaggaatcgtattagatgcatgttttgctaagtcttcaattttgtcagttggtacacctaagtgatatagccattcttgacatatttcattaccactacattctgtgattggctttttaatataatcgccgtttacatctgaatataaggcataaatccacgtagatatttcatttttaggttggtctttaaactgttgctgacgattgattgtaaaactgatttgccatgcagaatcattgattgtaataattccgccagtaaccgttttgcctgcaagagggtcacgtttacaaatgctttctattgtatcgataatatctttattgtttgttgtcgatgttgcagaaacaaaccaactttttttaggaatattttggcaaaacttatcaggattaccaaattcaggactttgtcgtgctaaatttttccatagtgtccaactaccacctaattcgtcagttggtggcgctggtgtatcattatcaccataagtagagctttctgtaatactaccgtttgtcacaaagacaagatcgtttatagtcagtttaatagattctgcattaccattacggtcaattaatatttctcgggcaattttttgacttgtcgtaacatctactttaatatcttttacttttacatcgtattcaaattgaaccccatgcgattttaaatattcaaccataggtaatactaaggattcatattgattatatttagtgaattttaaagctgaaaagtctgcgagaccaccaatatgatgaacgaatcgcattagatagcgacgcatttccattgcagaatgccacggttcaaatgcaaacatcgttttccagtaaatccaaaagtttgaattaaagaaatcgtcggaaaatacatctgttattttgacatcatctaaatcttcttcattcgttaagcataaatctaaaatttctttaatcgccgttttagtcaaagtgaagtctccatctgtgactaaacgttgaccctgtttctcaataacacgacagcgagaatagttagggtcttctttgtttaaccaatagaattcatctaatactgacgcatgatcaatttcaagtgaagggatagatctgaataaatcccacaaacattcaaagtggttctccatttcacgaccacctcggacaacatagccttttaaaggcatattttcaccatcaagactaccgcccgctttgggtaactcttctaaaatatgaatcttagaaccttccatttgaccatcccttattaaaaaacaagctgcagcaagtgaagctagaccagatccgattaagtaagcggatttgttttctacattttcaggttttttagggcgcgcaaatgcttcataatttccataactgtaatacatatccaccaagtcctttcgtattagaatacactcagactatacccctttgtgaattgcaaatattagtatttatattggtaaatttgacgaaattagatcatttttatatttttgatttttaaaattttatcactcgaatgttttttgattctgaggtgcgggacttggaataattcgaatcattatgtggcatgttaaacagctaaatataagctatgtacatttaacaagcggatactcctgacgcaattatagtatcattacatattgtttaatcgtttggggtaatgtaattaaaaggtaaaataggcagagtgttatacataaaatgtaaagaaagaggcgatagaatgtctaaaatcaggtcttttacaatattaagtctacttatttacttagctatgatgtgctatacagtagtgacttattcaaaattaccaaccaaagtacctattcactataatttagcaggggatgctgataactttgctgataaatgggtgctgcttttgattaatagcgcatttatagtgatttggcttatatttttcattgcaggtagatactatgaacgatttgccaaatggtcacattataatcatacaccacgtgaaattcgagcgattaaattatttttaagtacgttaaatttagagattatgagctatatgtctatcttcacagtattagaaatttggcaaatacaacaccatcatcaattcaatttactatggtttaatatgatatttatcattatcattggtttgacgcttgtcatattttgtttacttcctacaattcataaaatgagagattctcaataaaaatataaactgtcatgatgcagttttgaagcggattcctgagattattataaataatatctagtatttataattaaaatgatatattatttattatagttaaatattgtgtatattttgtgaactttttgtaaaaattcgattgcctgtcacatataggagtgttacattttaaatatgtgatcatcgcaaaatataagttgaaataggttgtagattaatcaggatgataaatattttatataaagagagggagtcattatgacactacttactgtaaatccattcgataatgttggattatcagccttagttgcagcagtacctattattttatttttattatgcttaaccgtttttaaaatgaaaggcatttatgcagcattgacaactttggttgttacattgattgtggctttatttgtatttgaattaccagcgcgtgtatcagcaggtgcgattacagaaggcgttgttgccggtattttcccaataggatatatcgttttaatggcagtttggttatataaagtttctattaaaacaggacaattttctattattcaagatagtattgcaagtatttcagaggaccaaagaatccaactattattaattggattttgtttcaacgcatttttagaaggtgcagcaggatttggtgtgccaattgcgatttgtgcagtattattaattcaacttggatttgaaccattaaaagcagcgatgttatgtttaattgctaatggtgcggcgggtgcctttggtgcaattggtttaccagttagtattattgatacgtttaacttaagtggaggcgttacaacattagatgttgcgagatactcagcattaacacttccaattttaaactttattattccatttgttttagtattcattgtagatggtatgaaaggtattaaagaaattttacctgtcattttaacagtgagtggtacatatactggattacaattattattaacaatattccatggtccagaactagcagacattattccatcactagcaacaatggtggtgttagcatttgtttgtcgtaaatttaaaccgaaaaacattttcagattggaagcgtctgaacataaaattcaaaaacgaacgcctaaagaaattgtctttgcttggagtccgttcgtcattttaactgcctttgtattagtatggagtgcaccattcttcaaaaaattattccaacctggaggtgcacttgaaagtttagtaataaaattgccaattccaaatactgtgagtgatttatcgcctaaaggaattgcgttgcgtctcgatttaattggtgcaactgggacagcgattttattaacagtaattattacaattttaattacgaagttaaaatggaaaagtgcaggtgctttattggtcgaagcaattaaagaattatggttaccgatccttacaatttcagctatcctagctattgctaaagttatgacatacggtggtttgactgtagcaattggacaaggtattgctaaagcgggagcaattttcccattattctctccagtattaggttggattggtgtgtttatgactggttcagttgtaaataacaatactttattcgcacctattcaagcgacagtggcacaacaaatttcaacaagcggttcattacttgtggcggctaacactgcaggtggtgtagcagcgaaacttatttcaccacaatcaattgccattgcgactgcagctgttaaaaaagttggtgaagaatctgcattattaaaaatgacgttaaaatacagtattatatttgttgcctttatttgtgtttggacgtttatactaacgttaatattctaaatataaataatgttgtcacttggattcaaatgacattttaaatctaattattcatgaatcgaactagtacgaaatgcaatgagcatcttgtctagttcgattttttaatgtctaaaaatgtcgtatatgtaatcagagtagaaagtgttgaggcgtttcagaagttgtttagaaaagtaagtaaaataaaaaatgcactgagcaacaaaagatgttgctcgtgcatttagatgattcttatcatttcaaataagaatgtgttaatcaacgtatataagttaaaattggtttggataaaatgatatctatcgttgtgtattgtttgtttttatagttcgcgacgacgtccagctaataacgctgcacctaacgctaatgataatccaccaaatacagttgtaccgatgaatggattttcttcaccagtttctggtaatgcttgagctttgttagcatctgcatggtttgctggttgcttcttatcaacaacaagttcttgaccaggtttgatcatgtttttatcagctaatttgttatctgcagcaattttgtcagcagtagtgccgtttgcttttgcaatgtcatttactgtatcaccaggtttaacgacatgtactccgttgccgtcttctttaccaggcttgttgccatcttctttaccaggcttgttgccgtcttctttaccaggtttgttgccatcttctttgccaggttttttgttgtcttctttaccaggtttgttgccgtcttctttaccaggcttgttgttgtcttcctcttttggtgcttgagcatcgtttagctttttagcttctgctaaaatttctttgctcactgaaggatcgtctttaaggctttggatgaagccgttacgttgttcttcagttaagttaggtaaatgtaaaatttcatagaaagcattttgttgttctttgttgaatttgttgtcagcttttggtgcttgtgcatcatttagctttttagcttctgctaaaaggttagcgctttggcttgggtcatcttttaagctttggatgaaaccattgcgttgttcttcatttaagttaggtaaatgtaagatttcatagaaagcattttgttgttctttgttgaatttgttatcagctttcggtgcttgagattcatttaactttttagcttctgctaaaaggttagcactttgacttgggtcatcttttaagctttggatgaaaccattgcgttgttcttcgttcaagttaggcatgttcaagatttcatagaaggcgctttgttgatctttgttgaacttattttgttgcgcatcagcttttggagcttgagagtcattaagtttttgagcttcacctaaaacgttagcactttggcttggatcatctttaaggctttggataaaaccattacgttgatcagcgtttaagttaggcatatttaacacttgataaaaagcattttgttgagcttcatcgtgttgcgcagcatttgcagcaggtgttacgccaccagatataagtaatgtacctaaagttacagatgcaatacctacacctagtttacgaattgaataaatgtttttctttttcaaattaataccccctgtatgtatttgtaaagtcatcataatataacgaattatgtattgcaatactaaaatctatatttataattaaatttaaatgtaagttttacaacttataaaataaaaattttgtccaaagatttattcaggaagtaaaaggcttaaaaccgcaaaatcacgctattccgattaataaaaacagataaaatatatagatattttttataattaaagcggtttattacatatgagttaaaaaatatttttaagaataaaatggaattttgaatgtgctgaggtttaatttcggaaatggttttaagagatatagaaaatagaaagttgttcataatgtgctgaggttttattaaaaaatagaaaacacaagtgcactttagaatacagcacacttgcgtaatagagatattattcaaaaacaagatgtaaatgatttttatctgccaataattgattcacttgagctaataattgttcagcatggtcttgctgcgcgtcattcatatgaattaaaatttttctttcatcttcagttgagcgttcttttattagatagccttgcttttttaaattattgagagctctaacagtttgagggtatttatggtggattgtttcaattaaatctttaagaagaacgatgtttttattttgagaagtgataatagctagaattgtgaattctacaaaacttaatgttagatgctttttgataatattcttgaaatacattgtatacatcatcaagtttagaaattctttactatcttttggtatcatctgtgattcactttgatctgcaagattaaattgtttaatgatttgatcaaacaatgtaacacgttctgcaattttctctcgttgttcttcagatattgaaatgtaagtattacgctcatcaattttacttcgaactttactaatatatgaatgtttcacaagtacttttatatgctgtactaaatccgattgtttataacataaatctgaaacaatcttcttaaatggaagtgtgttttcttgctgatgaaataaataagtcagtaatataaattcttttatagtcatatcgacttcaggcttgacttttttcttaaaacgaaacatatatgcttcaatgattataaaatctctaattttgtcatggttattatatttcattgttctatctccttgtatatgcactttattttaatataacacaatataataagaaaaataatccataatttacaattaaaaataatatgatatttttattaaaatttgtgtttttgaataaatgacattatcaaacactatatttaaataagaaatagttatcgatatttgaaaaatcgaagaatattgattgatattatagaatatgagtcggtgttatttgtatataaagtattaatatgtaattaagaaagtcgacgcttgttaacattaacaacaactatatgtataaaaaaacctcgcaactgttagttagctgaatcattttgctaacgttgttgtgaggtcattttgttttaataatatctttataactttttcacggttaataataagtatatgaagaatggtgcaccaaacgcagcaatgaatacacctgccggcacttctttaggcaagaatagggtgcgtccaattaagtctgcgataacaattgatatggcaccaatcattgttgacattagtaactttttagcataacttccgcgaacgattgttttcgcgatgtgtggtgcaattaaaccgacaaacccaatatttcctactaaactgattgccatagatacgagtattgtagaagagattaattgaatcagcttcatacgttgtacatgtaaacctaagccaatcgctacagggtcatcaagtatagatattttcattttaggtataacaagaaataacaacggaataacagctacgattaccatacccaaaatgaatgtatctttaaacgttgcaccgtaaagacttccgactaaccaagtataagctttggctgcagatagttgctttgttgtaataagtagcccttgtacaagtgcaataaataatgtttgcattgaaataccgatgattatgagtgttgtcggtcgaatgtgacctttcgtttgaaacactaatagaatcaccattgcaattgcgccacctaatacagcaaatagaggaagtaaatgtatcgttaaatggctgaaaaatgcaataaagacaacagcacttaagctagcaccacctgtgattccgataatatctggtgaggcaattggatttttcaagacattttgtaacattaaaccgctcatccctagtgctgcaccagctaatatcgcaagtgtaatgcgaggtaagcgtaatacttctaaagtgaattgatctatactgtcatttggatttataaagtacatcagtacgcgttgtaatggtataaagcttgaaccaaccatcatacttaccactgaaacgatggctaaaaagattaacgcgaagatgagatggtaattgtcctttttattaatcttttcggtcataagcgttgacgtcctttcttcataagatagattaagacaatagcgccaatgacagcggtaacgacaccgataggcaactctagtggcttaataataatacgagcaacaatgtctgagataatcattaggattgcgccggttaatgcagtaaaaggaattaaatacttatagtttggtggtaataatcgtttactaatattcggtacaataagtcctacaaagacgattgatccagctacagcaaccgagatgcctgctagcatactaatgagcattataatcatccatttgattaattttatgttttgtccgagtccagtggcaatgtcgtcacttgtcatcaagatgttgatgtgtgcagccatgctaaatgcaattaaaataagtatcaatacaagcggaataatccatgggatatcccaaatgttacgtaatgaaacggagccactcaaccagaataataggccttgtaagtctgtttcattcataatgagaatgccttgagtaaaagctgtaaataacatcgcaatcgcggcacccgctaaaatgacacggtgaggtgaaaatagggtttgtctaaacatccctagtgcaacgactaagactgtaacaacaatagcacccaaaaacgcgatgacaacaatcattttaaaagattgaatttggataaatgtaatactaaagatgacaaaaaatactgcgcctgcattgacaccgaaaagccccggcgatgctattgggtttcgtgtaagtgcttgcatcaacaaacctgagactgctagtgcggcgcctgtcaatagcgcaatgattgttctcgacgcccgtgcaccagtgacaacatcatgtaaatcgttttcactatcaaagttgaataacgcctgtatcaccgtacctggtgacacaagcgtatttccaatcattaaacttaagatagctactattgcaagacataaaccagcaataacgatttggtattttggtttaagtagcatcgtaaaactccttaattattttgattgtttttcaatatttaacttttcatataaatcgtcaataagttttaatgatgatttatatccgccagctaagttccaagtgatttcatctaaatcatcagatacttggttgtttttaactgcgtctaaatttttccactctttacttgaagtccattcgctttcagtctttttaactaatgcagcatctttcgcatttggatctgattttactacaaaaatatgatcagcgttcattaatggaatgctttctttagatgtaagttggataatatctttaccattatcaacttgtttttgtaagtctttattacgtttgaatcctaaatcatttaagatttcaccagcatatccaccagcataaattcttgtatgatcagcacggaagttaacaactgaagctttcaatggccatgcatctttatactttgcttttgcatctttttggaatgcagctactttatcatcgtactttttaagtaaatcttcagcttctttttctttccctaaagctttccccattaacttagttgtatctttgaatttgaaaactgtatcagtagaaactgttggtgcgattttagataattgatcgtaaactttttcatttctaacttttgacgcgacaattaagtccggttttaatttagagatttcttctaagttaggtgcaggttcttgacctacaatcttagtatcttttaaatcattttttatgtattcgaatttcggtttttgtgtccatgattctacagcacctacaggtttaacacctaaagatacagcgacgtcagtggcaccttgatatagtgtaacaacgcgctttggtttccctttaatttcagttgtacccattgcatgtttaattgaagttgtttccttatctttgctatcagatgattgcttatttgaattcccactacatcctgctaaaacaagtaggaaagcaagcgtaacaacaagcattttaattactttattcattgactaattagcctccttcgtgatgtatgacaatgagaatcattatcacggtttagtatgaattaaattttttcctaagtcaataaaatatttatgatttacatgcaacttataattatttgacatataaatgcataaaaaatataatcctaattacttgatagtgagaatcattatcaattaggtaacacacaatattatagaattttaaatttgaggaggaagcgcttttgattgaaaaaagtcaagcatgtcacgattcattgttagattctgtagggcaaacacctatggttcaacttcatcaactatttccgaaacatgaagtgtttgcaaagttagagtatatgaatcctggaggcagcatgaaagatcgacctgccaagtacatcattgaacatggtattaaacatggtttaatcactgagaatacacatttaattgaaagtacttctggtaatttaggcattgcgttggcaatgatagctaaaatcaagggattaaaactcacgtgtgttgttgatcctaaaatatcaccaacaaatttgaaaattattaaaagttatggtgccaatgtagaaatggttgaagaacctgatgcacatgggggttatttaatgactcgtattgcaaaggtgcaagaactgttagccactattgacgatgcatattggattaatcaatatgcgaatgagttaaattggcaatcccattatcatggtgcaggcacagagattgttgaaacaattaagcaacctatagattattttgtcgcgccagtcagcacgacaggtagcattatgggtatgagtagaaaaattaaagaagtgcatccaaacgcacaaattgttgctgttgatgcgaaagggtcagtcatttttggtgacaaacctattaatagagaattacctggtatcggtgctagtcgtgtacccgaaatattgaatagatcagaaattaatcaagtgatccatgtagatgattatcaatctgctttgggctgtcgaaaactgattgattatgaaggtatatttgctggaggttcaacaggttcgattattgcagcgattgagcagttgataacgtcaattgaagaaggtgcaacaattgtcacgattttaccagatcgaggcgatcgttacttagatttagtttattcagatacatggttagaaaaaatgaaatcaagacaaggagttaaatcagaatgaatagagagatgttgtatttaaatagatcagatattgaacaagcgggaggaaatcattcacaagtttatgttgacgcattaacagaagcattaacagcgcatgcgcacaatgattttgtacaaccgcttaagccgtatttaagacaggatcctgaaaatggacacatcgcagatcgaattattgcaatgccaagtcatatcggtggtgaacacgcaatttcaggtattaagtggataggtagtaagcacgacaatccatcgaaacgtaatatggagcgtgcaagtggtgtcattattttgaatgatccagaaacgaattatccaattgcagttatggaagcaagtttgattagtagtatgcgtactgcagcagtttcagtgattgcagctaagcatttggctaaaaaaggatttaaagacttaacaatcattggttgcgggctaatcggagacaagcaattacaaagtatgttagagcaattcgatcatattgaacgcgtttttgtttacgatcaattctctgaagcgtgtgcacgctttgttgatagatggcaacaacagcgtccggaaattaattttattgcgacagaaaatgctaaagaagcagtatcaaatggtgaagtagtcattacatgtaccgtaacggatcaaccatatattgaatatgattggttacaaaagggtgcatttattagcaacatttctatcatggatgtgcataaagaagtctttattaaagctgacaaagtcgtagtagatgactggtcacaatgtaatcgagaaaagaaaactattaaccaattggtgttagaaggtaaattcagcaaagaagcacttcatgctgaactagggcaacttgtgacaggtgacacaccaggacgtgaagacgatgatgaaatcatattacttaatccgatgggtatggctatcgaagatatttcaagtgcttactttatttatcaacaggcacaacaacaaaatattgggacaacattgaacctatattaagaatgcgaggtgtctgaacattgcagaatcatacagcagtcaatacagcacaaacgataatattaagggatttagttgatgcattattatttgaagatatagccggtattgtatcgaatagtgagattactaaagaaaatggacaaaccattttgatatacaaacgtgaaacacaacaaataaagatacctgtttattttagtgctttaaatatgtttcgttatgaaagttcacaaccaattacgatagagggaagggcgtctaagcaacctttaacggcagctgaattttggcaaacaatcgctaatatgaattgtgatttaagtcatgaatgggaagtggctcgcgttgaagaaggactgactactgctgccacacagcttgctaaacaattatcagaattagatttagcgtcgcatccttttgtgatgtccgaacagtttgcaagtttaaaagatcgtccatttcatccattagctaaagaaaaaagaggattaagagaagcggattatcaagtgtatcaagctgaattaaatcaatcatttcctttaatggttgcagcagttaaaaagacacaaatgattcatggcgatactgcaaatattgatgaattagaatcattgacagcacctataaaagaacaagcgacagatatgttacatgatcaagggttatcaatagatgactatgtactatttcctgtacatccttggcaatatcaacatattttgccgaacgtctttgcgaaagagattagggaaaaattggttgtaccattaccattaaaatttggagattatctatcggcttcaagtatgcgttcattaattaatatcgcagcgccgtataaccatgttaaagtgccatttgcaatgcagtcattaggcgcattaaggctaacgcctacgcgttacatgaaaaacggagaacaagccgaacgattattacgtcaacttatagaaaaagatgccatgttagctaagtatgtcacagtttgtgatgaaacagcttggtggtcatatatgggtcaagataatgatattttcaaagatcaattaggtcatttaactgttcagctaagaaaatatcccgaagtgctagccaaaaatgatacgcaacagctagtgtcaatggcagcactcgcggcaaatgatcgcaccttatatcaaatgatttgtggaaaagataatatttctaaaaaagatgtcatgacgttatttgaagatatcgcacaagtctttttaaaggtaacactatcatttatgcaatacggcgcattaccagagttgcatggtcaaaatatattgttgtcatttgaagatggacgtgtacaaaaatgcgtgttacgtgatcatgatactgtcagaatttataaaccatggctaacagcacatcagctttcattgccgaagtatgtcgtcagagaagatacacctaatacgctaattaatgaagatttggaaacattctttgcttattttcaaacattagctgtatcggtaaatctatatgccattattgatgcaattcaagatttatttggtgtaagtgagcatgaacttatgtcgttgttaaaacaaattttaaaaaatgaagtggcaactatttcctgggttacaactgatcagctagctgtcagacatattttatttgataaacagacgtggccatttaaacaaattttattaccattgctatatcaacgtgatagtggtggaggtagtatgccttcaggtttaactaccgtaccaaatccaatggtgacatatgattaatcagtctatatggcgcagtaactttcgcattttatggctcagtcagtttatagcgattgctggactgacagtacttgtgccattattgccaatttatatggcatcactacaaaatctatcagtcgtagaaatacagttgtggagtggtatagcgattgctgctccagctgtaacgacgatgatagcttcgccgatatgggggaagctaggtgataagatcagtcgaaaatggatggtgctacgagcgttacttggtttggcggtatgtttatttttaatggcattgtgtactacaccattacagtttgtacttgtgaggttattgcagggactatttggtggtgttgttgatgcatcaagtgcgtttgcgagtgcagaggcgccagctgaagatcgtggaaaggtattaggaagactgcaaagttcagtcagcgcagggtctcttgtgggaccattaattggcggtgttacagcttcgatattaggttttagtgcgttactgatgagtattgccgttattacttttattgtctgtattttcggtgcattaaaattgattgaaacgacacatatgccaaaatcacaaacaccaaatattaataaaggtattcgccgttcatttcaatgtctattatgcacacaacaaacatgtcgatttattatcgttggcgttttagcaaactttgctatgtatggcatgctaactgcattatcaccacttgcttcatcagtgaatcatacagcgatagatgaccgtagtgtgattggatttttacagtccgcattttggacggcttcgatattaagcgcgcctttatggggtcgctttaatgataaatcatatgttaaatcagtatatatatttgccacgattgcatgtggttgtagtgcgatactgcaaggtttagcgacgaatgtagaatttttaatggctgcaagaatacttcaaggattaacatatagtgcattgattcaaagtgtcatgtttgtcgtcgtgaatgcgtgtcatcaacaacttaaaggcacatttgttggtacgacaaatagtatgttagttattggtcaaattattggtagtcttagtggcgctgccattacaagttatactacaccagctactacgtttatcgttatgggcatagtatttgctgtaagtagtttatttttaatttgttcaaccatcactaatcaaatcaacgatcacacattaatgaaattatgggagttgaaacaaaaaagtgcaaaataaagaattaatacaacatgcagcgtatgcggctatcgaacgtattttaaatgaatattttagagaagaaaatttatatcaagtaccacctcaaaatcatcaatggtctatacaattatctgagctcgaaacgttaacaggtcaattcgcttattggtctgcgatggggcatcatatgtatcatccagaagtatggcttattgatggtaaaagtaagaaattaacaacatataaagaagccattgcgcgtattttgcaacatatggctcaaagtgcagataatcaaacggcagtgcaacaacatatggcgcaaattatgtctgacatcgataatagcattcatcgcacggcgcgttatttgcaaagtaacacaatagactacgcagaggatcgctatatcgtttcagaacaatctttatatttaggtcatccatttcatccgactcctaagagtgcaagtgggttttcagaagcagatttagagaaatatgcacccgaatgtcatacatcattccaattgcattatttagctgtgcatcaagatgttctgctcacgcgctatgtagaaggtaaagaagatcaggttgagaaagtgttgtatcaattagcagatatagacatatcagagatacccaaagattttattttattaccaatacatccttatcaaatcaatgtgttgcgacagcatccacagtatatgcaatatagtgaacaaggtttgataaaagaccttggcgtttccggtgattcagtgtacccgacgtcttcggttagaactgtattttcaaaagcattaaacatttatttgaaattaccgatacacgttaaaatcactaattttatacgtacgaatgaccttgaacagattgaacggacaattgatgccgcgcaagttatcgcatcagtcaaagatgaggttgaaacaccccattttaaattgatgtttgaagaaggatatcgtgcattgttaccgaatccattagggcaaacagttgaacctgaaatggatttattaacaaatagtgccatgattgttcgtgaagggataccgaattaccatgctgataaagatattcatgtattggcgtcattatttgaaacgatgcctgattcaccgacctctaagttatcacaagtgattgagcaaagtggtttagcaccagaagcatggcttgaatgttatttggatcgtacattattgccgatattaaagctgtttagtaacacaggcattagtctagaagcacatgtacaaaatacattaattgaattaaaagatggcataccagaagtgtgctatgtcagagatttagaaggtatttgtctatctagaacgattgctactgaaaaacagcttgtgccaaatgttgttgcagcatctagccctgttgtatatgcacatgatgaagcgtggcatcgtcttaaatattacgttgtagtaaatcacttaggacatttagtatcaactattggtaaagcgactagaaatgaagttgtgttatggaaacttgtagcgcatcgtcttatgacttggaaaaaagaatatgcgaataacgcagtatttattgactgtgtagaagatttatatcaaacgccgaccattgcggctaaagcgaatttgatgagtaaattgaatgattgtggtgcaaaccctatttatacacatataccaaatccaatttgtcataacaaggaggtatcgtattgtgaatcaaacaattcttaatcgtgtaaagactagagtgatgtaccaattggtatcatcgcttatttatgagaatattgttgtgtataaagcgtcatatcaagatggtgtcggttattttacaatagaaggaaatgattcagagtatcgttttactgctgaaaagacacatagctttgatcgtatacgtatcacatcaccaattgagcgtgtcgtaggagatgaggcagatacaacaacagactatacacaattactgagagaggttgtatttacatttcctaaaaatgatgaaaagctagaacaatttattgtcgagttattacagacagaactaaaagatacgcaaagtatgcagtatcgagaatcaaacccaccagcaacacctgagacatttaacgactatgaattttatgcgatggaagggcatcagtatcatccaagttacaaatcacgtttaggatttacgttgagtgataatttgaaatttggtcctgactttgtaccaaacgttaaactgcagtggttagctatcgacaaagataaagtagaaacgacggtatcaagaaatgttgtagttaacgaaatgttacgtcaacaagttggcgataagacttatgaacattttgtacagcaaattgaagcgtctggcaaacatgtaaatgatgttgagatgatacctgtacacccatggcagtttgaacatgtcattcaagttgatttggctgaagaaaggcttaatggcacagtactatggttaggggaaagtgatgagctatatcaccctcaacaatcgattcgtacgatgtcgccaatagacacgacaaaatattatttaaaggtaccaataagtataacgaatacttcaacgaaacgagtgttggcgcctcatacaattgaaaatgcagcgcaaattacggattggttaaagcagatacagcaacaagatacgtatttaaaagatgaattaaagacagcttttctaggggaagtcttaggacagtcttatttaaatacacaactttcgccttataaacaaactcaagtttatggtgcgttaggtgttatatggcgtgaaaatatatatcatatgttaatcgatgaagaggatgcgataccatttaatgcactttatgcgagtgataaggatggtgtaccattcattgaaaattggattaaacaatatggttctgaagcttggacaaagcaatttttagctgtagcgattcgtccaatgattcatatgctttattatcacggtattgcctttgaatcgcatgcacaaaatatgatgctcattcatgaaaatggttggcctacacgtattgccttaaaagatttccatgatggtgttcgttttaagcgtgagcatttaagtgaagctgcttcacacctgacattaaagccaatgccagaagcacataaaaaagtgaatagtaattcatttattgaaacagatgatgaacgtttagtacgtgactttttacatgatgcatttttctttattaatatcgccgaaatcatcttatttattgaaaagcaatatggtatcgatgagaagctgcaatggaaatgggttaaaggcatcattgaggcgtatcaagaagcatttccagagctgaataactatcaacattttgatttgtttgaacctacgattcaagttgaaaagttaacgacacgtcgattattaagtgactccgagttaagaattcatcatgttacaaatccattaggtgtaggaggtattactgatgcaacaactatctctgaaacatagattaaacaatggtgattcagtttatggcatttttaattctataccggacccattgatgatagaggttatcgcagcaagcgggtatgactttgttgtgattgatacagaacacgtggcgattaatgatgagacactagcgcatttaattcgtgcagctgaagcagcgcatattataccaattgtacgtgtcactgcagtgatagatagagatatcattaaagtgttggatatgggtgcgagaggtattattgtgccacacgttaaagatcgtgagacagttgagcatattgtgaaattaagtcgttattacccgcaaggattaagaagtttgaatggtggtcgcatggcaagatttggacgtacaccattacttgatgcaatggagatggctaatgagcatattatggtgattgccatgatagaagatgttgaaggggttatggccattgacgatatagcacaagtcgaaggtttagacatgatagtcgaaggtgccgcagatttatcccagtcacttggcataccatggcaaacgcgtgatgatcaagtaacatcacatgttcaacatatttttgaagttgtgaatgcacatggtaaacatttttgtgcattaccacgtgaagatgaagatattgcaaaatggcaggcacaaggtgtacaaacatttattttaggtgatgatcgcggaaaaatatatcgccatttaagtgcatctctagcgacgtctaaacagaagggggatgaagactaatgcgtatagttcaacctgttattgaacagttaaaagcacaatctcatccagtttgtcattatatctatgatttagtcggactggaacatcatttgcaacatattacatcgtcattgcctagtaattgtcagatgtactatgcaatgaaagcaaatagtgaacgaacaatcctagatacaattagtcagtatgttgaaggattcgaagttgcatctcaaggtgaaatagcaaaaggtcttgtttttaaaccagcaaatcatattatttttggtggccctggtaagacagacgaggaactaagatatgcagtaagtgaaggtgttcagcgtattcatgttgaaagtatgcatgaattacaacggctaaatgccatcttagaagatgaagataagacacaacacattttattgcgtgttaatttagcaggaccatttcccaatgcaacgttgcatatggcaggacgcccaacacaatttggtatttctgaagacgaagttgatgatgtcattgaagctgcgctagcaatgccaaatattcatctagatggatttcattttcattctatttctaacaatttagactcgaatttacatgtcgatgtagtgaaactttattttaaaaaagcaaaggcatggtctgaaaaacatcaatttcctctcaaacatatcaatcttggtggtggcataggcgttaactatgcagatttaactagccaatttgagtgggataattttgtagaaaattttaaaacacttatcgttgagcaagaaatggaagatgtgacattgaactttgaatgtgggcgctttattgtggcacatattggttactatgtgacagaagtgctagacattaagaaagtacatggtgcttggtatgccattttaagaggaggtacgcaacaatttagactgccggtatcttggcagcataaccatccttttgacatttatcgctataaggacaatccatattcatttgaaaaagtttcaatttcgagacaggacacaacgttagtcggtcaattatgtacaccgaaagatgtctttgctagagaaatacagatagaggcaatcagtacaggcgacgttattgttttcaaatatgcaggtgcatacggatggtctatttcacatcacgatttcttaagccatccacatcctgaatttatttatttaacgcaaacaaaggaggatgaataactattgaatcatattcatgaacatttaaaattggtaccagtagataagattgatcttcacgaaacattcgaacctttaagattggaaaaaacgaaaagtagtattgaagcagatgattttatacgtcatcctattttagtgacagcgatgcaacatggtagatatatggttatagatggtgtgcatcggtatacaagtttgaaagcgttaggatgtaagaaagttccagtgcaagaaatccatgaaacacaatattcaattagtacatggcaacataaagttccatttggtgtgtggtgggaaacgttacaacaagaacatcgcttaccatggactactgagacaagacaagaagcgccatttattacgatgtgtcatggtgatacagaacaatatttgtatacaaaagatttaggcgaagcacattttcaagtatgggaaaaggttgtcgcaagttatagtggttgttgttctgtagagagaattgcacaaggtacatatccttgtctttctcaacaagatgtactcatgaagtatcagccattgagttataaggaaattgaagcggttgttcataaaggggaaactgtgccagcaggtgtgacacgctttaatatttcaggacgatgtcttaatcttcaagtaccactggcattacttaaacaagatgatgatgttgaacaactgcgcaattggaagcagtttttagcagataagtttgccaatatgagatgttatactgaaaaagtatacttggtggagcaatagttttactgtgatgttgagggaaatatgatgatttagcctattaatagcgaaaatataataaaacaatatagtgtggagaacttttgatattttataaatattgaagttctccatttttgtattttgcatataaaaattaaataaaataaggtatattaaggtaaagtataaatattaaataaatggggaatagacatggaaaaaaatgtagaaaaatcattcataaagataggtttatattttcaaatagcttatatagtactcatggctataactttatgtgggtttgtaatttgctatggactaattttcggccttttctatttattgtcaggtagcagagctgattatttaatagtaacgatagttatatcggcaataatttctatatttgtaattatactttcaatcgtacctgtcatcgtattggcatctgacttatttaaagaaaggatttcaaatggtgtcatattaattgtattggctattatcgctttagtattatgcaactttgtatctgcaatactctggtttgtttcagccatatctattttaggtagaaaaaaattagtatctacatcagatactaccactattcaaaaaagtaaagggaacgcaaatcaagcatcacataaagacacgtgtaaaaaggaacttgatagtcaagacatgatggaacatcctgagtttaaaaatcccacgactaaaaacctagaaggattaaacgaagaagtacataaagatgaagctacaactaaagttgacagtgataatacggaaccgccgattgaatcaaaagaccatgtctcgaaaaaagattgatgacaaactaatcgagagacttaaaaaataatattcaacataaacacttttaaaacgacatttaaacgcattgccaatcactaaaggtagtgcgtttaactataccttaaatatctgaatattttgttaaatggagttacctttgttgtactattcaaatgaagaggagtaaaatgtaattaaaggaaagtaatttgaggagtgatctttatgacaaacaacaaagtagcattagtaactggcggagcacaagggattggttttaaaattgcagaacgtttagtggaagatggtttcaaagtagcagttgttgatttcaatgaagaaggggcaaaagcagctgcacttaaattatcaagtgatggtacaaaagctattgctatcaaagcagatgtatcaaaccgtgatgatgtatttaatgcagtaagacaaactgcagcgcaatttggcgatttccatgtcatggttaacaatgccggccttggaccaacaacaccaatcgatacaattactgaagaacagtttaaaacagtatatggcgtgaacgttgcaggtgtgctatggggtattcaagccgcacatgaacaatttaaaaaattcaatcatggcggtaaaattatcaatgcaacatctcaagcaggcgttgagggtaacccaggcttgtctttatattgcagtacaaaattcgcagtgcgaggtttaacacaagtagccgcacaagatttagcgtctgaaggtattactgtgaatgccttcgcacctggtatcgttcaaacaccaatgatggaaagtatcgcagtggcaacagccgaagaagcgggtaaacctgaagcatggggttgggaacaatttacaagtcagattgctttgggcagagtttcacaacccgaagatgtttcaaatgtagtgagcttcttagctggtaaagactctgattacattactggacaaacaattattgtagatggtggtatgagattccgttaataatcatccattaataataaataaatccttattgttaagtttaatcacttagcagtaaggattttttagtgcacttagaagggattgtattagtagaaaattaataacagaagctcttaagtgagttatgatgtcacagtctaatgcatcagttgaaagcattactaaattctatcaagcatagttacgctaaaacatcataaaacaccactatctaatttatctaaataaaaattcacaaagttatcgcattttatttttataaataaaaaatatctataaaaagcttacaatactttatgtttttgtgatatatttttaatgtataaatgaggtggaagatttggaaaaagttttgataactggtggggctggttttattgggtcacatttagtagatgatttgcaacaagattatgatgtttatgttctagataactatagaacaggtaaacgagaaaatattaaaagtttggctgacgatcatgtgtttgaattagatattcgtgaatatgatgcagttgaacaaatcatgaagacatatcaatttgattatgttattcatttagcagcattagttagtgtcgctgagtcggttgagaaacctatcttatctcaagaaataaacgtcgtagcaacgttgaaattattagaaaccattaaaaaatataacagtcatataaaacgattcatctttgcatcatctgcagccgtttatggtgatttacctgatttacctaaaagtgatcaatcattaattctaccattatcaccatatgcaatagataaatattacggcgaacgtacgacattaaattattgctcgctatataacattccaacagctgttgttaaattctttaatgtatttgggccaaggcaagatcctaagtctcaatattcaggtgtgatttcaaaaatgttcgattcatttgaacataacaagccttttacattttttggcgatggtctgcaaacgagagactttgtttatgtttatgatgttgttcaatctgtgcgcttaattatggagcataaagatgcggttggacatggttataacattggtacgggtacatttacgaatttgctagaggtttatcgcattattggtgaattatatggaaaatcagtcgagcatgattttaaagaagcaagaaagggagatattaagcattcttatgcagatatttctaatttaaaagcattaggatttgttcctaaatacactgtggaaacaggcttaaaggattactttaattttgaggtagataatattgaagaagttacagcgaaagaagtggaaatgtcgtgaaattggcattgaagctgtccataataagggttacgcctatcaaagaaaattagacacactagaagaagtaaaaaagggctattttccaatcaaacgtgcgattgacttggtattaagtatcgttttattatttttaacatttccgattatgttcatattcgccattgctatcgtcatagattcgccaggaaaccctatttatagtcaggttagagttgggaagatgggtaaattaattaaaatatacaaattacgttcgatgtgtaaaaacgcagagaaaaacggtgcgcaatgggctgataaagatgatgatcgtataacaaatgtcgggaagtttattcgtaaaacacgcattgatgaattaccacaactaattaatgttgttaaaggggaaatgagttttattggaccacgcccggaacgtccagaatttgtagaattatttagttcagaaataataggatttgagcaaagatgtcttgttacaccaggattaacaggtcttgcgcaaattcaaggtggatatgacttaacaccacaacaaaaattaaaatatgacatgaaatatatacataaaggtagcttaatgatggaattatatatatcaattagaacattgatggttgttattacaggggaaggctcaaggtagtcttaatttgcttaataagtttaaataaaagttacattttaaagattgtgaccaattgttacagtataacgaggaatcccttgagacagtatcaaatggcattaagaaatatttgccatcattgatttgcatggctataaatactattcatctgatgagatagccatgttaagaaattgaaagtatagcattaaaggggtttgtaacagttgaaaattatatattgtattactaaagcagataatggtggtgcacaaacacatctcattcaactcgctaaccatttttgcgtacaccatgatgtttatgtcattgtaggcaatcatggaccaatgattgaacaactagatgcaagagtcaatgtaattattatcgaacatttagtaggtccaattgactttaaacaagatattttagctgtcaaagtgttagcacagttattctcgaaaattaaacctgatgttatccatctacattcttccaaagctggaacggtcggacgaattgcgaagttcatttcgaaatcgaaagacacacgtgtagtttttactgcgcatggatgggcttttacagagggtgttaaaccagctaaaaaatttctatatctagttattgaaaaattaatgtcacgtattacagatagcattatttgtgtttcagatttcgataaacagttagcgttaaaatatcgatttaatcgattgaaattaaccactatacataatggaattgcagatgttcccgctgttaagcaaacgctaaaaagccaatcacataacaatattggcgaagttgttggaatgttgcctaataaacaagatttacagattaatgactcgacaaaacatcaatttgttatgattgcaagatttgcttatccaaaattgccacaaaatctaatcgcggcaatagagatattgaaattacataacagtaatcatgcgcattttacatttataggcgatggacctacattaaatgattgtcagcaacaagttgtacaagctgggttagaaaatgatgtcacatttttgggcaatgtcattaatgcgagtcatttattatcacaatacgatacgtttattttaataagtaagcatgaaggtttgccaattagcattatcgaagcgatggctacagggttgcctgtcatcgctagtcatgttggtggcatttcggaattagtaactgataatggtatatgtatagtgaacaatcaacctgaaactattgccaaagtcctggaaaaatatttaatagacagtgattacatcaaaatgagtaaccaatctagaaaacgttatttagaatgttttacagaggagaaaatgattaaagaagtggaagacgtttataatggaaaatcaacacaatagtaaatatctaacattgttacttatcggtttagcggtttttattcagcaatcttcggttattgccggtgtgaatgtttctatagctgactttatcacattactaatattagtttatttactgtttttcgccaaccatttattaaaggcaaatcattttttacagtttttcattattttgtatacatatcgtatgattattacgctttgtttactattttttgatgatttgatatttattacggttaaggaagttcttgcatctacagttaaatatgcatttgtagtcatttatttctatttagggatgatcatctttaagttaggtaatagcaaaaaagtgatcgttacctcttatattataagcagtgtgactataggtctattttgtattatagctggtttgaacaagtcccctttactaatgaaattattatactttgatgaaatacgttcaaaaggattaatgaatgaccctaactatttcgcgatgacacagattattacattggtacttgcttacaagtatattcataattacatattcaaggtccttgcatgtggtattttgctatggtctttaactacaacggggtctaagactgcgtttatcatattaatcgtcttagccatttatttctttattaaaaagttatttagtagaaatgcagtaagtgttgtgagtatgttagtgattatgttaattctactttgttttaccttttataatataaactactatttattccaattaagcgaccttgatgccttaccgtcattagatcgaatggcgtctatttttgaagaggggtttgcatcattaaatgatagtggatctgagcgaagtgttgtatggataaatgccatttcagtaattaaatatacattaggttttggtgttggcttagtggattatgtacatattggctcgcaaattaatggtattttacttgttgcccataatacatatttgcaaatttttgcggaatggggcattttattcggtgcgttatttatcatatttatgatttatttattatttgaattatttagattcaatatttctgggaaaaatgtaacagcaattgttgtaatgttgacgatgctgatttactttttaacagtatcgtttaataactcaagatatgtcgcttttattttaggaattatcgtctttattgttcaatatgaaaagatggaaagggatcgtaatgaagagtgattcactaaaagaaaatattatttatcaagggctataccaattgattagaacgatgacaccgctgattacaatacccattatttcacgtgcatttggtcccagtggtgtgggtattgtttcattttctttcaatatcgtgcaatactttttgatgattgcaagtgttggcgttcagttatattttaatagagttatcgcgaagtccgttaacgacaaacggcaattgtctcagcagttttgggatatctttgtcagtaaattatttttagcgttaacagtttttgcgatgtatatggtcgtaattactatatttatagatgattactatcttattttcctactacaaggaatctatattataggtgcagcactcgatatttcatggttttatgctggaactgaaaagtttaaaatacctagccttagtaatattgttgcgtctgttattgtattaagtgtcgttgttatctttgtgaaagatcaatcagatttatcattgtatgtatttactattgctattgtgacagtattaaaccaattacctttgtttatctatttaaaacgatacattagctttgtttcggttaattggatacacgtctggcaattgtttcgttcgtcattagcatatttattaccaaatggtcaactcaacttatacactagtatttcttgcgttgttcttggtttagtaggcacataccaacaagttggtatcttttctaacgcatttaatattttaacggtcgcaattataatgattaatacatttgatcttgtaatgattccgcgtattactaaaatgtgtatccagcaatcacatagtttaactaaaacgttagctaataatatgaatattcaattgatattaacaatacctatggtctttggtttgattgcaattatgccatcattttatttatggttctttggtgaggaattcgcatcaactgtcccattgatgaccattttagcgatacttgtattaatcattcctttaaatatgttgataagcaggcaatatttattaatagtgaataaaataagattatataatgcgtcaatcactattggtgcggtaatgaatttagtattatgtcttgttttgatatatttttatggaatttacggtgctgctattgcgcgtttaattacagagtttttcttgctcatttggcgatttattgatattactaaaatcaatgtgaagttgaatattgtaagtacgattcaatgtgtcattgctgccgttatgatgtttattgtgcttggtgtggtcaatcattatttgcctcctacaatgtacgctacgctgctattaattgcgattggtatagtagtttatcttttattaatgatgactatgaaaaatcaatacgtatggcaaatattgaggcatcttcgacacaaaacaatttaagtatcggtaacgctatactttagaaatttaagaataagaagaaaaggcaatttcttattgaaaaatggaagttgtcttttttaattctctttaaaagcgggaaacaaaagcagttaaatgcctttttgcattcaatattaaatattatatcaatttcgaatatttaaattttatataattggatataacaaataaataataattattgcaaaacacacccgaaattaattattataaaagtatattcataaaaggaggaatatacttatggcatttaaattaccaaatttaccatatgcatatgatgcattggaaccatatatagatcaaagaacaatggagtttcatcacgacaaacatcacaatacgtacgtgacgaaattaaacgcaacagttgaaggaacagagttagagcatcaatcactagcagatatgattgctaacttagacaaggtaccggaagcgatgaggatgtcagtccgtaataatggcggtggtcattttaaccattcattattctgggaaatactatcacctaattctgaagaaaaaggtggcgtaatagacgacattaaagcgcagtggggcactttagatgaatttaaaaatgaatttgcaaataaagcaacaacattatttggatcaggttggacttggttagttgttaatgatggaaaattagaaattgtgacaacgccaaaccaagataatccattaacagaaggcaaaacaccaatcttactatttgatgtttgggagcatgcctactatctgaaatatcaaaataaacgtccagactatatgactgcattttggaatattgttaactggaaaaaagttgatgaattataccaagcagcaaaataatataacttaatataattgaggtggagcatctattaggtgtttcaccttttttgtacttaatatctttacttattcgtttttgtgtaatgggatagcgcgtaaaagtggcaaaataataagataaatttcaactcgaaataccttattattgttgactataacgatgacttaaatgctatatacatcagacaacactattgattaatcaacatattgacattaaataaattgacaaaataagtaattattgtgaatctaaagtgaaatttttataaaaaattgtaatgattcaaaaattttgttgcatttcttttgtaatcatatgataatataaatgtaatcaaattgtaatataaggggaaaagacaatgaaaaaattagcaacagtaggttctttaattgtaacaagcactttagtattctcaagtatgccttttcaaaatgcgcatgctgacacaacttcaatgaatgtgtcgaataaacaaagccaaaatgtacaaaatcatcgcccttatggcggagtagtaccacaaggaatgacgcaagcacaatatactgaattagagaaagctttaccccaattaagcgctggcagtaatatgcaagactataatatgaaattgtatgatgcgacgcaaaatattgctgataaatacaatgtgataattacaactaatgtaggggtatttaaaccacatgctgttagagatatgaatggccatgcgttacctgtaacaaaagatggcaatttttatcaaacgaatgtagatgcaaatggtgttaatcatggtggtagtgaaatggtgcaaaataaaacaggtcatatgaatcagaacacacacatgaaccaacagccacacatgcaacaaggtcatatgcaatcatcaaaccatcaaatgaatcaaagtaacaaaaaagttttaccagctgctggtgaaagtatgacatcaagtattcttactgcaagtattgccgcactactattagtatctgggttattcttagcatttagacaacgttcaacaaataaataaacatcatacgttttaaagtagaaaaatcatgtgattacctgaaagttattgtcgattaaacaatagctaaacagtcatcacatgattttttttcaataattttaataatccgattgtcttatacgtgtcagtgttaattcagatatttcctgtggaatataccacttattaatcataatcggatagggcgtttgtgcgtacaatgtttcaataatcagccaacaatgtgtatcaccatcaaacacgtgactatgatttttgaagtggggcgctttggtaatagacatttttaaatctgattgatatgcattgctataaatcgtttgctcaacgaacgtcttcatgtcgtcttcgttttgtgtattcactttaaatgtgtcaatgacatttaacggtataaaggtaaaacaaaatgcatcagcttgcttagaatggttgtcctttttttgataatagcgttccattgcaatgacggcagaaggatggtttgcaaacaaatgatttgtatattcactttctaaatcaacacgataattaattgatgacatagatacacgatctaataatatttgatcaagtggatgcttaaattgatccatacttgaagcgtgttgggcatttgtttgtggaataacaaagtgtcccttccctcttgtactctctacgatgccatcttcggctaacaattttatagcttggcgcaaagtcatacgactgacatcaaagcgcgcacaaagttccttttcagtaggtaatgcatggccactcggatattttcctatttgaatttctttatataacgtattataaatcgttaaaaattttggttgtgtttgcgtcacgtagacaacctccataaagttacttaatcattctcatcatacaataatttttactcgaattggaaaaattataaaaattaaacatagaaacaacttgaacattggttttatgcaagatcagtagagataactgtaaaatgttcttaatattgtcaaaatgtaatgcttgaaagcgcttttaaaaaatattattatatacatggttagacaaatagacaaattactatacaaatattgggaggaatattttatgaaatcaacaccacacattaaaccaatgaatgacgtcgaaattgcagaaacggttctattgccaggagatccgttaagagctaagttcattgcagaaacatatttggacgatgtggaacagttcaatacagtgcgaaatatgtttggttttaccggaacatataaaggtaaaaaagtttctgtcatgggttcaggaatgggtatgtcatctattggcatttactcttatgaattaattcatacatttggttgtaaaaaattaattcgcgttggttcttgtggcgcgatgcaagaaaacattgatttatatgatgtgattgttgcacaaggtgcctctactgattcaaattacgttcaacaatatcaattaccaggtcattttgcgccaattgcttcttatcagttattagaaaaagctgttgaaacagcacgtgacaaaggtgtacgtcatcatgtaggtaatgtgttatcaagtgatattttctataacgcggatacaacagcgagtgaacgttggatgcgtatgggtattttaggtgtagaaatggaatcagctgcattatacatgaatgcaatttacgctggtgtcgaagcattaggtgtgttcacagtgagcgatcatttaattcatgaaacgtcaacaacacctgaggaaagggaacgtgcatttacagatatgattgaaattgcactgtcattggtgtagatgattatgaatgttgaatattctaaaataaagaaagcagtacctattttattattcttatttgtattcagtttggttatagacaactcattcaaattgatttctgtagccattgctgatgacttaaacatttcagtaacgacagtaagttggcaagcgacattagccggtttagtaattggtattggcgctgtagtatacgcttcattatctgatgccattagtatacgcacactatttatttatggcgtgatattaatcattatcggatcaattattggttacattttccaacatcaattcgcattacttttagttggacgtattattcaaactgcaggtttagctgctgcagagacattatatgtgatatatgttgcaaagtatctttctaaagaggaccagaagacttaccttggcttaagtacgagcagttattccttgtcattagttatcggtacattatcaggtggatttatttctacgtatttacactggacaaatatgtttttaattgcattaatcgtagtatttacgttgccattcctatttaaattattaccaaaagaaaataatacaaataaagctcatttagattttgttggcttaattctagtggcaactatcgctacaacagttatgctgtttattacgaactttaattggatatatatgattggtgccttaattgcgattatcgtttttgcgctatatattaaaaatgcgaaacgtccattagtaaacaaattatttttccaaaataaacgttatgcttcatttttatttatagtatttgtaatgtatgccatccaattgggttatatttttacgttcccattcataatggaacaaatttatcatcttcagctagacacaacatcactgctattagtaccgggttatattgtagcagtcatcgttggtgcactaagtggtaaaatcggcgaatatcttaattcaaaacaagcgattatcacagcaattattttaatcgcactgagcttgattttacctgcatttgcagtaggtaatcacatttcaatcttcgtcatttctatgatattctttgcaggtagctttgctttaatgtatgcacctttacttaacgaagccattaaaacaatagatcttaatatgacaggtgtggctattggtttttataatttaattattaatgtggcggtatctgtaggtattgcgattgctgcggctttaatcgattttaaagcattaaatttcccaggcaatgatgcattaagttcacatttcggtattattttaattattttaggtttaatgagtattgtcggattagttttattcgtcatcttaaatcgttggacacaatctgaaaaataaatagatataaattcgcgagatatattcgtatttatagtaaaattaaataaagagattatataacacgaggagtagtaagtatgaaatttgagaaatatatagatcacactttattgaagcctgagtcaacacgtacgcaaatcgatcaaatcatcgatgaagcgaaagcatacaattttaaatctgtatgtgtgaatccaacgcatgttaaatatgcagcagagcgactagctgattcagaggtgctagtttgtacggtaataggattcccattaggtgcgtcgacaactgcaacgaaagtatttgaaacagaagatgcaattcaaaatggtgcagatgaaattgacatggtcatcaacatcggcgcattaaaagatgggcgttttgatgatgtacaacaagacattgaagcagtggttaaagctgcggaaggtcacacagtaaaagtgattattgagacggtattgttggaccatgacgaaatcgtaaaagcgagtgaattaacaaaagcggctggtgcggacttcgttaaaacttcaacaggttttgcaggtggcggtgcgactgcagaagacgttaaattaatgaaagatacagtaggtgcagatgtagaagtaaaagcatcaggtggcgtacgtaatttagaagatttcaataaaatggttgaagcgggtgcgacacgtattggtgcgagcgcaggcgttcaaattatgcaaggtttagaagcagattcagattactaatatatataaaatttgggagtgatagctatgacaagaccatttaatcgtgtacatttaatcgtaatggattcagtaggtattggtgaagcgccagacgcagctgattttaaagatgaaggttcacatactttaagacataccttagaaggcttcgatcaaactttaccaaaccttgaaaagttaggtctagggaacatcgataaattaccagtagtaaatgcagttgaacaaccagaagcatactatactaaattgagtgaagcttcagttggtaaagatacaatgactggtcactgggaaattatgggattaaatattatgcagccttttaaagtataccctaatggattccctgaagagttaattcaacaaattgaagaaatgacaggtcgtaaagttgttgctaacaaaccggcatcgggtacgcaaattatcgatgagtggggcgagcaccaaatgaaaactggtgacttaattgtttatacaagtgcagacccagtattgcaaattgctgcacatgaagacattatcccattagaagagttatatgatatttgtgaaaaggttcgtgagttgacaaaagaccctaaatatttaattggtcgtattatcgcacgtccatatgttggtgaaccaggaaactttacacgtacatctaatcgacatgactatgcgttaaaaccatttggtaaaactgtcttagatcatttgaaagacggtggttatgatgtcattgccatcggtaaaattaatgacatttatgatggtgaaggtgtaacagaagcggttcgtacaaagagtaacatggacggtatggatcaattgatgaaaattgttaagaaagatttcacaggtattagcttcttaaacttagtagactttgatgcattatacggtcatcgtcgtgataaaccgggttatgcacaagcaattaaagatttcgatgatcgcttgccagaactgtttagcaacttaaaagaagacgatttagtaattattacagcagaccatggtaatgacccgacagcgccaggtacggaccatacgagagaatacatcccagtaattatgtacagtccgaaatttaaaggtggtcatgcactagaaagtgatactacattcagctctatcggtgcaactatagcagataatttcaacgtaacattaccagagttcggtaaaagttatttaaaggaattaaaatagaataaatttagatataataaaaacagcagtgaagttaactataataatagttttcttcactgctgtttttattataatagagaaacgtaagacggtaggacctcttatttaggagtatcctgatttaatgttaaagaatacgttttcggattgaaccggaaattaaatcgacaattgcgaccattagtactaaaccgattaatataatacctacacggtcccaagaacgtgtttgaatggcaaatatgagtggtgtcccgataccaccagccccaattagccccagtatagaagctgaacgtaagtttagttcaaagcgataaagtatgagtgatagaaaggcaggcataatttgtggtatgactgcaaatacgagtgttttaatcttattcgcaccactggcctttaatgattctacagcactgaaatctagactttcaatatcttcagctaaaagtttcccaagcatacctacggaatggatacctaaagctaatacacctgaaaatgaacctgggccaacagctttgataaatataagtgccattacaatttctgggaagacacgtataacacttaaaataaatttgctaacacctgaaactgggcgtagctttaccatattatttgcacctagaaatgctaatggaatacagataattgcggcgatgaaagtacctacaacggctatcgcaaaggtttcaagtaaaccacgtaataagtcttcgccatctggtatatagatatagctgatatcaggatggaataatccgctgaatatggattttaagatttctaatgatttacttttaagttctaaacttggtacacctgcaaatgcccagatgataatagctaagacgacaattgcaataagccatcttttaatcaattttcgtttgtgtgcttttgtgtgaacattatatttttctatttcctgtgtcatgcgagatgtgccctcactttcgtactgatgtaatcaatgacgacgataactaaagtaaataaaataatcgttgctgtttttggatattgaaataaaccaagtgtttgatcataaaacaatccaataccgccagcgccgactaatccaagcacagctgaagcacgtatatttacttcaaatgcatataatacgtatgacataaatgacgatatggcttgtggtacaacaccgaaaacaatccattttattttattagcgccaacagccgtcattgcttccattggacctggatctatcgtttccaatgattcatataataattttccaataatacagatagttaaaataaacaatgctaatatccctggaatttgaccgattccaaatacagccacaaagattgctgctaataacaaatctggaatagtacgaactatatttaaaataaagcgcgagggtattgaagtccacttttgatgaacgatattgctagcacataataacgcaattggtattgaaacgatgctacctaatactgtacttacgatagccattcgaatggtatctaacattggcgttgtaatttgttgtaaatactcgaaatcaggtggaatcatttgtttgaatagatcacctatttgaggtattcctatcattaaatctccaaaattaaaccccgtataaatgaagctccaaatgataagcacaatgattaacatgaaggtaaaactcgtttttaaagaaacctttttctttaaaagggagtcatactttgtaggtgtttctaaaggcatgttagttcactcctagcttttcatcttctttaattgtacgtccatatattttactaaatacgtcatctgttgcttcagatgcaggaccatcatagacaacttcaccatcacgtaaaccaatgatgcgtgtgccatattcttttgctaagtcaacaaaatgtaaattaattaaaattgtgatgcctaattcttggttgatttttcttaaatcatccataacctgtttcgttgttaatgggtctaatgaagcaactggttcatctgcaagaataatttcggattcttggcatagcgcacgtgcaatagatatacgttgttgttggccacctgataattcatcagagcgttgattatatttatctaagatgttgacccgttctagtgcatccattgctttaattttgtcttcttttggaaataaacctaataccattttccaagtagggtgataacctacacgtccacttagtacatttcgtaatacacttgaccgtttaactaaattaaaatgttggaaaatcatgcctatatttcggcgcatttctaataatgctttaccatgggctttagtgattgatttaccttgaatgaaaatttcacctgacgtgatatcatgcaaacgatttacagatcttaataacgtggatttcccagcaccagatagtccgacaatgactgcaaattcacctttttcaatatttaagttaatatttttcaagcctacatgaccgttaggatagactttactgacgtttttaaatttgatttgactcatgtttgacacctttctttaataaagaaaagccaaggtaaactgaaatatcatagacattgggtttctgtgtacaaatagtttcaaatgtacagcgacacctttctatatctgtttcagtttagcgcctagcttttcaatattaatctagaatatatctattgaacgaaagcttttaataccaaattcgataatgattcattggttaaataatgattatttcatatctttaactaatttttcgtactctcttacaatgtcgaaatttgaatctttcgtttctgtgtatccttcatgtgaataaacttcgctaataattttgtgaccttcttttgatttagcaatgtctataaaagcttttttcaatttctcttggaagtctttatccatatctggtcttacagaaattgtgtcattcggaatagcttgtgttaattttaaaattcgtgtgtctttaaatacatttggttggtcttttttcacagtattacgtgcatcgttaaatacagctgcagcatctacatctccatttaataatgagataactgcttggtcatgacctttaacattcacaattttcatatctttagttgcattaatacctgcttcgttttttaacatcgcaagtgggaatgtatatccagcagttgatgttacatcttgtaaggcaattttcttaccttttaaatctttcaagcttttaatttttgagtcttttttaacaagaatttctgatttataactatctacaagttctttacttgctgaaccatcttcttttacaccaaaacgttgtgcttgtaataataaatcagctgctttttgatcatgtgctaatgtgtatgccgttggtggtaagaaaccaacatcaacttttttagacttcatagcttcaacaattgtattgtagttagttgatacagacactttaactggaatccctaattctttagatagtaatttttctaatggttttgctttagcctctaatgttccagcattttgcgaaggtacaaattgaactgttaattctttaggtttgtatcctcctgatttagaatccgaatcattactagcgttcttttgattatctaaagaacttgaatttccacatgctgctgcaaaaacaatgactgctaacattaatacaaataaacacttaaaatttttcatttgataactgtccccttcacattcttaatcgtgtaatatgtatgcaatgaaattacacttatagcgtaccacatttaaatactaaaaagtattttataaaaatgaattttaataactttctttaagagtgtgataagattttgtaaaattttcgttaaattgcccatttcaaacatatatttatcctataattcaagaacaaatttattttaaaaggagcctcaaaaaatgaaaaatatatataagtcattaactgtctctgcaattgttgcaacggtatcattaagtgctttaccgcaatctttagctataacgcatgaatcgcaacctacaaagcaacagcaaacagtattattcgatcgttctcatggtcaaacagctggtgctgcagattgggttagtgatggtgcattttcagattatgcggattcaatacaaaaacaaggttatgacgttaaagctattgatggtcattcgaacataacagaagcaagtttgaaaagttccaaaatatttgtaattcctgaggctaacattcctttcaaagaatcagaacaggcagcaattgttaactatgtgaaacaagggggaaatgttgtctttatttcagaccattacaatgctgaccgaaatttaaatcgtattgattcatcagaggcaatgaatggttatcgacgtggagcgtatgaagatatgtcgaaaggtatgaatgcagaagaaaaaagttctactgcaatgcaaggtgtgaaaagttcagattggttatctacaaactttggcgtacgttttcgatataatgcactaggtgatttaaatacgagcaatattgtttcttcaaaagaaagttttggtattactgaaggtgtgaaatctgtatctatgcatgccggttcgacattagcaattactaatccagagaaagcaaaaggtattgtgtatacaccagaacaattgccagcgaaaagtaaatggtcacatgctgtagatcaaggtatttataatgggggcggtaaagcagaaggtccctatgtagcaatttctaaagttggaaaaggtaaagcagcatttatcggtgattcatcacttgtggaagatagttcgcccaaatatgtgagagaagataatggagaaaagaagaaaacatatgatggttttaaagaacaagacaacggtaagctattaaataatataacagcttggatgtctaaagataatgatgggaaatcacttaaggcgagtggcctaacattagatacaaagactaagttgcttgattttgaacgaccagagcgttcaactgagcctgaaaaagagccatggtcacaaccgccgagtggttataaatggtatgacccaacaacatttaaagcaggtagttatggcagtgaaaaaggcgcggatcctcagccaaacacaccagatgatcatacgccaccaaatcagaccgaaaaagtatcatttgatatcccgcaaaatgtttctgtaaatgagccatttgaagtgacaatacatttaaaaggatttgaagcaaatcaaacacttgaaaatcttagagttggtatttacaaagaaggaggacgtcaaatcggacaattttcaagtaaagataacgattataacccgccaggttacagtactttgccaacagttaaagcagatgaaaacggaaatgccacaattaaggtcaatgccaaagtactcgaaagtatggaaggttcaaagattcgtttaaaactcggtgacaaaaccttgattacaacagacttcaaataaatatataatagaaataagaaagatgtttgtgattgaaggagtgagtgaggatgtcaaacatagcattttatgtcgtgagtgacgtacatggttatattttcccaacagattttacgagtagaaatcaatatcagcctatgggattgttactagcgaatcatgttatagaacaagacagaaggcagtatgaccaaagttttaaaatagataatggtgattttttgcaagggtcaccattttgtaattacttaatcgcgcatagcggcagtagccagcctttagttgatttttataatcgaatggcattcgactttggtacgcttggtaatcatgaatttaattatggattaccatacttaaaagacactttacgcagactcaattatccagttttgtgcgctaatatttatgaaaatgatagtacattgactgataacggtgtgcagtattttcaggttggagatcaaacggttggtgtgataggtttaacgacacaatttattccccattgggaacaaccagagcatattcagtcacttacgtttcatagtgcttttgcaacacttcaacaacacttacctgaaatgaagcgatatgcagatatcattgtggtttgttaccatggtggatttgaaaaggatatagaaagtggtacgccgaccgaagtgttaacgggtgaaaatgaaggatatggcatgttagaagcgttttctaaagatatagatatctttattacgggtcaccaacatcgacaaattgctgaaaggtttaagcaaacggctgtgattcaacctggtacgagaggtacaactgtaggcaaagttgtcttgagtactgatgaatatgaaaatgtatccgttgaatcatgtgaattacttcctgttatagatgatcccacatttactattgatgaagatgaccaacatatacgaaagcagctagaggactggttagattacgaaattacaacattgccatatgatatgatgattaatcatgcatttgaggcacgtgtagctccgcatccttttactaattttatgaattacgctttattagaaaaaagtggagcagatgttgcctgtacagctttgtttgattctgctagtggtttcaagcaagtcgtgacgatgcgagatgttattaacaattacccatttccaaatacatttaaagttttagctgtaagtggtttcaaacttaaacaagccattgaacgatcagcagaatattttgacgtgaaaaatgatgaagtaagtgtgagcgcagacttccttgaacccaaaccccaacactttaattatgatatatatggtggcgtaagttataccattcatgttggaagaccaaagggacaacgtgtgagcaatatgatgattcaaggtcacgcagttgatttaaagcagacatatacaatttgtgtaaataattatcgtgcagttggcggtggtcagtatgatatgtatatcgacgcgccagttgtaaaagatattcaagttgaaggcgcacaattacttattgattttttatcaaataataaattgatgcgcatcccgcaagttgttgattttaaagttgaaaagtgacggatatatgtaaaacttacttgattttaatcgggtaagtttttgtttttgtttaaactaatcactcttaaacaccaatatactttaagaaaaatgttgattttacaaaaaacaaggcttatattttatataacttaatattatgaagtgattaatttggaaacaattaaacaagaagtaagagaatctattgttaaaggaattttcgcgggatataaggactatgttaatgagagaaatgaagtcaagaaacgtatggtgattagtgatgcctatgtgtacaccaaatctaatcatattgaaaatcaagttgctaagcatttggaaaattttgttaagtatattaaagaaaatgctggaccatcatggaagtatttaaagtttatatttaataaggatgaagagaaaaataatatcatgtttatattgaaaaatgaagattactttgatgaaaaaaatgtaagcgtagggaagagtttagttgctgataagaatcaaaaaagtaaaaactacctagagggacttatagctaagaatagtggcattaattttgatactgttggagaagattttaaaattaggcatcaaatgactgcagatagtatattatttaatataaaagaaggcagtaatagagatattaattcttattttttaattattacatatcgtattgataaagaatcaaagcaattagctgcaatcaaacaatggttgccaaatccagaaacaaattctgcaattatggttgatgatttgacaccattgttagacaaagtaatagtagaaagagaagattatcatattgacgaagaagagttagaagtacttaaaaacgatggagagttagaattcatagatgtagaacatgcatttggtatcagtatcgatgaagataacgatatgattgaaagcgaaaggtgaagttaatgtttattggcaagaatttagaatacgtgagaaagcttaatgctctaagtagaaaagaattatcagaaaaaataaatgtaagtgaacaagcaatttggcaatatgaaacaaaaaatatgatgccagaaattaataaaatttatgatatgacatctatttttaatgttaaatctagctactttattagcgagcagcccgaagagctcctaataaattctgtcgataaacatagtatagcttttagagcaaaaaattataaagtatctacgaaactattaaataagcaatattatcaagcaatgtatttatctaatttaactagctacttattttcctttgtaaagataccggataatattattttatctttaataaataatttagatgacttgttgaatggcaatttagaatcactaaataaaaaagaaagcataaaagaaactgctaaagttgtgagggctaaaattcttcaagacgaaagcaatgaagcactattatttatgcttgaaaaagcgggtatagttatctacgaaaagcgaattaatgatagtatagacgcatatagtttttggagtaaagatcagacaccttttattatactgggtacaaataagggggtagcagttagaaggaattttgatcttgcacatgagctgggacatctcgttctacatcgtcatattcaattcgatttattatctcctgaagaatataagacaattgaacatgaggcagatattttcgcctctgaatttttactacctgaagaagcgtttaaaaaagactttgatcaaatgacaaaaaaatcaaatcctgattatttagctgtattgaaagaaaaatggtatgtttctatacaagcaattgcaatgagagcctattatctaggtctaatgtctagtactcagtacagatatttttgggcatcattaaataaaaaaggctataaaagtaaagagcctttagacgacgtgattgaaatgtcacgtcctgtcaaaatgaatagtttattaaagttgtattttgatagaaatatactgacaccacaaaaattattgaattatttaaaagttgatgaaacatttttgaatcatctagcaggtattaatttaaaactctttaaggattatgttaatgaaaatagagaatataatataacgaatctatataaataagacaccaatatttaaacctcgagctgaaaagattatcatttcagttcgaggtttttatttgcaacatctgttgataggtatcgacaaggaccttttaatgttgtgttttgtgcgatataacaagctttttaggctattaaagaatattcagaattaaatatataattatgaataaattatgtcattgaaaaaattatgattataaaatcattctaaaaacaccgaaataacaatgatttcatgaaaacatttattttaaaatttgatatttgttcaaataatattcgaaattaaacttttttgtatagaattttctttatatcctgagagacatgtactataatgtttgtgaaataattcacaaagtataaaggagtggttgtatatgttaactatacctgaaaaagaaaatcgtggatcgaaagaacaagaagtggcaattatgattgatgctctagctgacaaagggaaaaaggcattagaagcattatctaaaaagtcacaagaagaaattaatcatattgttcatcaaatgagcttagcagctgttgatcaacatatggtgctagcaaaattagcacatgaagaaactggaagaggtatatacgaagataaagcgattaaaaatttatacgcttctgaatatatatggaattcaataaaagacaataagacagtagggattattggtgaagataaagaaaaaggattaacgtatgtagcggaaccaattggtgttatttgtggtgttacgccaacaacaaatcctacgtcgacaactatttttaaagcgatgattgcaattaagacaggaaatccaatcatttttgcattccatccaagtgcgcaagaatcgtcgaagcgtgcagcagaagttgtattagaagcggcaatgaaggcaggtgcacctaaagatattattcaatggattgaagtgccctctatcgaagcaacaaaacaattaatgaatcacaaaggtattgcattagttctagcaacaggtggttcgggcatggttaagtctgcatattcaactggcaaaccggcattaggtgtgggaccaggtaacgtgccgtcttacattgaaaaaacagcacacattaagcgtgcagtaaatgatatcattggttcaaaaacatttgataatggtatgatttgtgcttctgaacaagttgtagtcattgataaagaaatttataaagatgttactaatgaatttaaagcacatcaagcatactttgttaaaaaagatgaattacaacgcttagaaaatgcaattatgaatgaacaaaaaacaagtattaaacctgatattgtcggtaaatctgcagttgaaatagctgaattagcaggtatacctgtccccgaaaatacaaaacttatcatagccgaaattagcggtgtaggttcagactatccgttatctcgtgaaaaattatctccagtattagccttagtaaaagcccaatctacaaaacaagcatttcaaatttgtgaagacacactacattttggtggattaggacacacagccgttatccatacagaagatgaaacattacaaaaagattttggactaagaatgaaagcttgtcgtgtacttgtaaatacaccatcagcggttggaggtattggtgatatgtataacgaattgattccgtctttaacattaggttgtggttcgtacggtagaaactcaatttcacataatgttagtgcgacagatttattaaacattaaaacaattgctaaacgacgtaataatactcaaattttcaaggtgcctgctcaaatttattttgaagaaaatgcaatcatgagtctaacaacaatggacaagattgaaaaagtgatgattgtctgtgaccctggtatggtcgaattcggttatacaaaaacagttgagaatgtattaagacaaagaacggaacagcctcaaattaaaatatttagcgaagtcgaaccgaacccatcaacgaatacagtatataaaggtctggaaatgatggttgatttccaaccggatacaatcattgcacttggtggtggttcagcgatggatgctgcaaaagcaatgtggatgttctttgaacaccctgagacatcattcttcggtgctaaacaaaagttcctagacatcggtaaacgtacttataaaataggcatgcctgaaaatgcgacgttcatttgtatccctacgacatcaggtacaggttcagaagtaacaccatttgcagttatcacagatagtgaaacaaatgtaaaatatccgttggctgattttgctttaacacctgatgttgcaattattgaccctcaatttgtgatgagtgtgccaaaaagcgttacagcagatacaggaatggatgtactaacgcatgcaatggaatcatatgtatctgtaatggcttcagattacacaagaggtttgagtctacaagcgattaaattgacgttcgaatatttaaaatcatctgttgaaaaaggtgataaagtttcaagagagaaaatgcataacgcatcaactttggctggtatggcatttgcaaatgcattcttaggcattgcacactcaattgcgcataaaattggtggggaatatggtattccgcatggtagagcgaatgcgatattactaccgcatattatccgttataatgccaaagacccgcaaaaacatgcattattccctaaatatgagttcttcagagcagatacagattatgcagatattgccaaattcttaggattaaaaggtaatacgacagaagcactcgtagaatcattagctaaagctgtctacgaattaggtcaatcagtcggaattgaaatgaatttgaaatcacaaggtgtgtctgaagaagaattaaatgagtcaattgatagaatggcagagctcgcatttgaagatcagtgtacaactgctaatcctaaagaagcgctaatcagtgaaatcaaagatatcattcaaacatcatatgattataagcaataatctatctgataataatcatctaactcacctgaaattacaaaagtaaaaaatgccacataaacttaaagtcgataatcattatacggttatcggcttttctttattgccaaatcttcagagagatacaacctagacaatcaatttttttaataaagaaagtattaagattggtacacttttcacaaaatattactactttagagtataattatttttaatttcatataaataaaaaggcgaaaataatgcggtttaaaagtaattaattgtttaaacgatatgtaatatgtaaatactatatatataataccaattttaatgaaaatttttaagggaggtaaataatagaaagtacattagaattaacaaaaattaaagaagtattacaaaaaaacttgaagattttaattattttaccgctattatttttaattattagcgctattgttacatttttcgtcttatcacctaaatatcaagctaatactcaaattttagtgaatcaaactaagggtgacaatcctcagtttatggcgcaagaggttcaaagtaatattcaacttgtaaatacgtataaagaaattgttaaaagtcctagaattttagatgaggtgtcaaaggacttaaatgataagtattcaccatctaaattatcgagtatgttgacaattacaaaccaagaaaatacacaacttatcaacatccaagttaaaagtggtcataaacaagattcggaaaaaattgcgaatagcttcgctaaagttacaagtaaacaaattccgaagattatgagtgtggataacgtatcaattttatctaaagcagacggtacagcagttaaagtcgcaccaaaaactgtagtgaatctaatcggtccactctttttaggattagttgtcgcgcttatatatatcttcttcaaagtaatttttgataagcgaattaaagatgaagaagatgtagagaaagaattaggattgcctgtattgggttcaattcaaaaatttaattaaggatggttgctacttatgtcaaaaaaggaaaatacgacaacaacactatttgtgtatgaaaaaccaaaatcaacaattagtgaaaagtttcgaggtatacgttcaaacatcatgttttcaaaagcaaatggtgaagtaaagcgcttattggttacttctgaaaagcctggtgcaggtaaaagtacagtcgtatccaatgtagcgattacttatgcacaagcaggttataaaacgttaattatcgatggggatatgcgtaagccaacacaaaactatatttttaatgaacaaaataataatggattatcgaatttaatcattggtagaacgactatgtcagaagctattacgacgacagaaattgataatttagatttactaacagctggtcctgtacctcctaatccaacagaattaattggttctgaaagatttaaagagttagttaatcttttcaatgagcgttatgacatcattattgtcgatacaccgcagttaataccgtgactgatgcacaactatatgcacgtgctattaaagatagtctgttagtcattgatagtgaaaaaaatgataaaaatgaagttaaaaaagctaaaacacttatggaaaaagcaggcagtaatattctaggcgtcattttaaataaggcaaaagtagataagtcttctagttattatcactattatggagatgaataggtatgattgatattcataaccatatattgccgaatatcgatgacggtccgacaaatgaaacagagatgctggatcttttaagacaagcgacaacacaaggtgttacagaaatcattgtaacatcacatcacttacatcctcgatataccacacctatagaaaaagtgaaatcatgtttaaaccatattgaaagcttagaggaagtacaagcactaaatctaaagttttattatggtcaggaaataagaattaccgatcaaatccttaatgatattgatcgaaaagttattaccggtattaatgattcacgctatttactaatagaatttccatcaaatgaagttccacactatactgatcaattatttttcgaattacagagtaaaggctttgtaccgattattgcacatccagagcggaataaagcaataagtcaaaaccttgacatactatacgatttaattaacaaaggtgctttaagtcaagtgacaacggcgtcattagcgggtatttccggtaaaaaaattagaaaattagcaattcaaatgattgaaaacaatctgacacatttcatcggttcagatgcgcataacacagaaatcagaccgttcttaatgaaagacttatttaatgataagaaattacgtgattattatgaagatatgaacggatttattagtaatgcgaagttagttgttgatgataaaaaaattcctaaacgaatgccacaacaagattataaacagaaaagatggtttgggttataaacagcaaatgaggggttttatggcacatttatctgtgaaattgcggcttttaatactagcattaatcgattcactgatagtgacattttcagtattcgtaagttattacattttagaaccgtatttcaaaacatattctgtcaaattattaatattggcagctatatcactattcatatcgcatcatatttcagcatttatttttaatatgtatcatcgagcgtgggaatatgccagtgtgagtgaattgattttaattgttaaagctgtgacgacatctatcgttattacgatggtgttcgtgacaattgttacaggcaatagaccgttttttaggttgtatttaattacttggatgatgcacttgattttaataggtggctcaaggttattttggcgtatttatcggaaataccttggaggtaagtcatttaataagaagccaactttagttgttggtgctggtcaagcaggttcaatgctgattagacaaatgttgaaaagtgacgaaatgaaacttgaaccggtattagcagtcgatgatgacgaacataaacgtaatatcacaattactgagggtgtaaaagtccaaggtaaaatcgcggatattccagaactagtgaggaaatataagattaaaaaaattatcattgcaattccaactattggtcaagagcgtttgaaagaaattaataatatttgccatatggatggcgtagagttattgaaaatgccaaatatagaagacgtcatgtctggtgagttagaagtgaaccaactgaaaaaagttgaagtagaagatttacttggcagagatcctgttgaattagatatggatatgatatcaaatgaattgacgaataaaactattttagttacgggcgctggaggttcaataggatcagaaatttgtagacaagtttgtaatttctatccagaacgtattattctacttggccatggtgaaaacagtatttatttaatcaatcgtgaattgcgaaatcgcttcggaaaaaatgttgatatcgttcctattatagcggatgtgcaaaatagagcgcgtatgtttgaaattatggaaatgtataaaccatacgcagtttatcatgcagcagcacacaagcacgtgccgttaatggaagacaaccctgaagaagcagtacgtaataatattttaggtacgaaaaatactgctgaagctgctaaaaatgcagaggtaaagaaattcgttatgatttctacggataaagccgttaatccacctaatgtcatgggagcttcaaagcgaattgcagaaatgattattcaaagtttaaatgatgaaacgcatcgaacaaattttgttgcagtgagatttggtaatgtacttggatcgagaggatctgtgattccacttttcaaaagtcaaattgaagaaggtgggccagttactgtgacacatcctgaaatgacacgttactttatgacaattcctgaagcttctagactagttttgcaggcaggggcattagcagaaggtggcgaagtatttgtgttagatatgggagaaccagtgaaaatagtagatttagcacgaaatttaattaagttaagtggtaagaaagaagacgatatacgcattacttttacagggataagacctggtgaaaaaatgtatgaagaattgatgaataaggatgaaattcaccctgaacaagtatttgaaaaaatttatcgtggcaaagtacaacatatgaaatgtaatgaagttgaagcgattattcaagacatcgtcaatgactttagtaaagaaaaaattattaactatgccaatggcaaaaagggagataattatgttcgatgacaaaattttattaattactgggggcacaggatcattcggtaatgctgttatgaaatggtttttagattctaatattaaagaaattcgtattttttcacgcgatgagaaaaaacaagatgacattcgaaaaaaatataataattcaaaattaaagttctacattggtgatgtgcgtgatagtcaaagtgtagaaacagcaatgcgagatgttgattacgtattccatgcagcagctttaaaacaagtgccgtcatgtgaattctttccagttgaggcagtgaagacaaatattattggtacagaaaatgtcttacaaagtgctattcatcaaaatgttaaaaaagtcatatgtttatctacagataaggcagcgtatcctattaatgctatgggtatttcgaaagcaatgatggaaaaagtattcgtagctaaatcaagaaatattcgtagtgaacaaacgcttatttgcggtacaagatacggtaatgtaatggcttcaagaggttcagtaattcctttgtttatcgataaaatcaaagctggagaacctttaacgattacagatcctgatatgacaagatttttaatgagcttagaagatgcggtagaactagttgttcatgcatttaagcatgcagagacaggcgatattatggttcaaaaagcaccaagttcaacggtaggggatcttgcgaccgcattattagaattgtttgaagctgataatgcaattgaaatcattggtacgcgacatggagagaaaaaagcagaaacattgttgacgagagaagaatacgcacaatgtgaagatatgggtgattattttagagtgccggcagactccagagatttaaattatagtaattatgttgaaaccggtaacgaaaagattacgcaatcttatgaatataactccgataatacacatattttaacggtggaagagataaaagaaaaacttttaacactagaatatgttagaaacgaattgaatgattataaagcttcaatgagataggagagattgacgttgaatattgtaattacaggagcaaagggttttgtaggaaaaaacttgaaagcagatttaacatcaacgacagatcatcatattttcgaagtacatcgacaaactaaagaggaagaattagagtcagcgttgttgaaagcagactttgtcgtgcatttagcgggagttaatcgacctgaacatgacaaagaattcagcttaggaaacgtgagttatttagatcatgtacttgatatattaactagaaatacgaaaaagccagcgatattattatcgtcttcaatacaagcaacacaagataatccttatggtgagagtaagttgcaaggtgaacagctattaagagagtatgccgaagagtatggcaatacggtttatatttatcgatggccaaatttattcggtaagtggtgtaagccgaattataactctgtgatagcaacattttgttacaaaattgcacgtaacgaagagattcaagttaataatcggaatgttgaactaacgctaaactacgtggatgatatcgtcgctgaaataaaacgtgctattgaaggaaatccaacgattgaaaatggtgtacctacagtaccaaatgtatttaaagtgacattgggagaaattgtagatttattatacaagttcaaacagtcacgtctcgatcgaacattgccgaaattagataacttgtttgaaaaagatttgtatagtacgtatttaagctatctacctagtacagactttagttatcccttacttatgaatgtggatgataggggatcttttacagaatttataaaaacaccggatcgtggtcaagtttctgtaaatatttctaaaccaggaattactaaaggtaatcactggcatcatactaaaaacgaaaaatttctagtcgtatcaggtaaaggggtaattcgttttagacatgttaatgataatgaaatcattgaatattacgtttctggcgacaaattagaagttgtagacataccagtaggatacacacataatattgaaaatttaggcgacacagatatggtaactattatgtgggtgaatgaaatgtttgatccaaatcagccagatacgtatttcttggaggtatagcgcatggaaaaactaaaattaatgacaatagttggtacaaggcctgaaatcattcgtttatcatcaacgattaaagcatgtgatcaatattttaatcagatattagtacacactggtcaaaattatgattatacattgaatcaaattttctttgatgatttggaattaagacaaccggaccactacttagaggcagttggaagtaacctcggagaaacgatggggaatattattgcgaagacatatgacgttttattacgcgaacaaccagatgcacttttaattcttggtgatacaaatagttgtttagcagcagtatctgctaaacgattaaaaattcctgtgttccatatggaagcgggtaatagatgctttgatcagaatgtacctgaagaaatcaatcgtaaaattgttgaccatgtcagtgatgtgaatctaccttatacagaacatagcagacggtatttattagatgaaggcttcaataaagcgaatatctttgtgacaggatcaccgatgacagaagtgatagaagcgcatcgagataaaattaatcacagtgacgttttaaataaactaggattagaaccgcaacaatacattttagtatctgcgcatagagaagagaatatcgataatgaaaagaattttaaatcattaatgaatgcgataaatgatattgccaaaaagtataaaattcctgtgatttattcaacgcatccaagaagttggaagaaaattgaagaaagtaaatttgaatttgatccattagttaaacagttaaagccatttggtttctttgattataatgcattgcaaaaagatgcatttgttgtgctatcagatagtggaacattgtcagaagagtcgtctattttgaagttccctggtgtccttattcgaacttccacagaaagaccggaagtactagataaaggtacggttattataggtggtattacctataacaatctaatccaatccgttgaactagcaagagagatgcaaaacaataacgaaccgatgattgatgctattgattataaagacactaacgtttcgacaaaagtagttaaaattattcaaagctataaagatattatcaatcgaaatacttggaggaaatgacgatgaggatagcgattcttggcgctactaacattaagcatatgtcattattatcacattatttaaaccacattgatttgaatatcaatgaggtggacattatatacactgacaaatatgatatcgaagaaaatatccaaggcatcaataattactataaatataaagtagatattaaagaagattggacatttatcaaaaaagctattgcttactatcgatttaggccatacgctatgaaaattctcaaagaaaatcattatgattttgtcatagtatggggaagttatacaggacacttatttaaaagttttttagaaaaacactataaaaataaattcattttaaatataagggactacttttttgaaaataataaacttattaagtatagaatgaaaaaaatcgttgatgctagcaggctgacaacattatcttcagaaggttttcttaaatttttacctaaatctgaaaaatatagaattatttatagttataacatgagtattattagagaaagtaatgtgaccgatgaattcaaaaaaagatggccaattaatataggttttattggtaatgtcagatttaatgagataaatcaaaaattgataaaggaactggcaaatgattcaaggttccatatgcaatattttggaacagggtcggaaaaattagaagtctttgctcgagaaaattttattaataatattacattttctggcggttttgacttggaagaaacaccgaaatatttaaatgaaattgatatacttaataatttgtttggtaataaaaatattgctttagatactgctttatccataagaatgtattatgcgttgtttttaaacaaacctattattacaacagatgatacattcaccgctacagaagctaataaattcggactgggttttagtgttaatccagaaaatttaaaaggtattggtgatgaattgatggattggtataacaatttgaatgtaatggacattaatcataaaagagaagcttatagaaacgatgtaattgaaaataataaacagttctatcaagagataggcaggatatttaatgaataagatatataatgtcacttcatatgttattgccattttaatgtttccttgccttatgttaggtgataaacctttattgtttttagcacctataagttatggagtaggaaagctctttataagcttctcaaataatccgaattttaaattttcgaaaattgtatacgatgttttaggttttcttagattagtatttatacctgctatgatagtgtttttccaggattcaactatagataatttaccattaggacaagattattttaatcaagcggttatttatataagtgtggagtttatcataggctcgctatttatattgatactatctaaattattcaaacatgaagtggtatcaagaaatagctttacactttctggatcatcaatttattacattgtgtttggtcttgttatttgtgggatttttgtagcttttcccgaagtgcgcaaaaacatatcatttttaattattaaaacagatgcaatgggaagaggaaccgaagcaacaagtggtttaaatgtcctttttgtaatgctatttcaacttgccttagcgttattattcttaataatcgcatatgcttcatataaaaagtataaagagaatcctaaaattatttatgttatattgccgctagctatagggattttaaatattagtttaattgttggtgaaagaagaagttatcaactttatacgatggttgctgttttaacagtggtgtcactcttgttttctaagcacaaaagacgtatcaatatcattattatatctgttggtattttcgtattagcattgatgacactatataaagaattgtatgtgtttaattatagttcatatagcgaggcgttaaatagtacgagtgtaagtaatcttaagatagttgacacgttgcagtcatatttttatggacctagcaatattgcagcttctatagactatttgaattactataatggttcgtttaaacaatatttatttgataatactagagctgtttttgggtttaatttctttgtagataaaaagcagttgattactagccaactttttaaccaattgatatatggtagtaaacaattgactggtcatctaatttcgagtgctggatatggaattatttattttggacccttattcttctatttgaatttaattgcaaatatcttttttgcatttctgagtgagtatattattcggaagagtcattcgttagaagtgatatttattggtacatatatttatatgagacttattacgagtatttttagtcacccgacaccattaatcacattgatttctatgattttagttgtatatgttatagctattatcccaggcattataataaaaaaatttactaaaaaagtagggatagaatgattgtaaaaacatttatgaaatcgaaaatatttagattaatgaatacaccactattattattttataagaaagaatatttaactggatattattttgaaaataaagtggctggatggttatgggcatggaaagctgttccgttcaagttgttaggaataaatacgagcttgccatttcctgcagatataactgttagaatgcataaccctaataacattgtttttgataaaaatgatattcatattttccaatcgcccgggacgtattttaataatttttcagcagttatatatataggtagaggtgtttatatagcgccaaacgtaggtattattacagctaatcataatattaaaaatttgaagtcacatgcaccaggtgaagatgtcaaaatagggaattatagttggattggaatgaactcagttatattaccaggagtagaattgggggaacatacaattgtaggggctgggtcggttgtaacaaaaagttttccagaaggtaacgttgttataggtggcaatccagcgaaagtcatcaagaaaatctgaggttaattatgagattaaataaatttattggcgattcgttcttaatgattttaagcagtggcatcgctcaagtcatattaatcatcactaccccaattattacaagactatattcacctacagaatttggtgagtttacaattttttcaaatatcgcaatgattttaataccaataataaatgcaagatacgatttgttgattgtgaatactaaaaatgaccgtagtgctaatatactttcacaaatcagttttttgatatcattgcttattttattaatactgataccaatatttgcgattagtgcatggttatacccaaactttatattagattttattttcattattattatgttgtttttggtaagtttaacaaacatttttacaaattatctaaataaggaaagaaaatataaagtgttaagtttgattaatgtgtttagagctggatcaatggctttacttcaaattattttcggacttttagcattaggaagtctaggattaattattggtttttcattatcctatatcgcaggcattacactaggatataaaacgtttaaaaagcactttaatattgtgagagataaagaagaaactaaagcattatttttagaaaataaaaatcagttagtttattcaacaccatcaatattattaaatagtttgtctttctcggttgttgtgttctttataggtattttgtataccaatacagaagtaggtatttatggtatggccataagagtactaggcataccagtgacaattatttcattagggttatcaaaaatatttatgcaacaagctaatgactattatattgaatatggtaacttccgaaatttattacttaaatttagttccatactggttatagtttctataattctttatgtgccactttatttgttcagtgaagaattagtcaatatattattaggacatagctgggttgacgcaattacagttataaaaattgttattccattatttgttataaggctgattgtatcaacggtatcactttctgtgattgtattacaaaaacaacagttagaattaatactgcaagcgttatttttaataggtactactgcaacatttgttatatcaaaaatgcttaatttaacttttttaaactttgtatctattaatacagttgttttaatcgtatcgtacatgatatttttcatagcactctattattttgctaaaaataaacagttcaaaaattcttagtctaaattcattaataaaaaggacgtcgattagatgagtgaaaaaaagattttgattttatgtcagtatttttatccggaatatgtatcttcagcgacgttaccaacacaattggcggaagatttaattgcgaatcacattaatgtcgatgtcatgtgtggatggccatatgaatatagtaatcataaacaggtttctaaaaccgagatgcatcgtggtattcgcattcgacgtctcaagtattcgaggtttaataacaaaagtaaggttggaaggatcatcaatttctttagtttattttcaaaattcgtgattaatatacctaaaatgttgaaatatgatcagattcttgtttactttaatccaccaatcttgccattaataccagacgttctacacagattgcttaagaaaaaatattcttttgtggtgtatgatatagcacctgataatgcgattaagacaggtgcaacacgtccaggtagcatgattgataaactgatgcgttacattaataaacatgtctacaagaatgctgaaaatgtcattgtccttggtacggaaatgaaaaactacttactaaatcatcaaatttctaaaaatcctgacaatattcatgtgattcctaactggtatgacatgcgtcagttacaagacaatcgtatctataatgacacatttaaagcttaccgtgagcaatacgacaaaattttattgtatagcggtaatatggggcagttacaggatatggagacacttatctcatttttaaaattaaataaggatcagcctcaaacgttaacaatactttgtggtcatggtaagaaatttgcagatgtcaaaacggcaatagaagaccatcgtattgaaaatgttaaaatgtttgagtttttaacaggtacagactatgctgacgtattaaaaattgcggatgtatgtattgcatcgctgattaaagaaggcgtcggtttaggcgtgccgagcaagaattatggctaccttgcagctaagaagccgttggtactcatcatggataagcaatctgatatcgttcaacatgttgaacaatatgatgcgggtatccaaattgataatggcgatgcacatgccatttataacttcatcaacactcactcgagtaaggaattgcacgagatgggtgagcgcgcacatcaactgtttaaagataaatatacgagagaaattaatactatgaagtattacaatctgttgaagtgaggagataattatgaagcgattattcgatgtagtgagttcaatatatggtttagtagttttaagtccgattctgttaattacagcattactaattaaaatggaatcacccggaccagccattttcaaacaaaaaagaccgacgattaataatgaattgtttaatatttataagtttagatcaatgaaaatagacacacctaatgttgcaactgatttaatggattcaacagcgtatataacaaagacagggaaggtcattcgtaaaacctctattgatgaattgccacaattattgaatgttttaaaaggagaaatgtcaattgtaggtcctagaccagcgctttataatcaatacgaattaattgaaaaacgtacaaaagcgaacgtgcatacgattagaccaggtgtaacagggctagctcaagtgatggggagagatgatattactgatgatcaaaaagtagcgtatgatcattattacttaacacatcaatctatgatgcttgatatgtatatcatatataaaacaattaaaaatatcgttacttcagaaggtgtgcatcactaatgagaaaaaatattttaattacaggcgtacatggatatatcggtaatgctttaaaagataagcttattgaacaaggacatcaagtggatcaaattaatgttaggaatcaattatggaagtcgacctcgttcaaaggttatgatgttttaattcatacagcagctttggttcacaacaattcacctcaagcaaggctatctgattatatgcaagtgaatatgttgcttacgaaacaattggcacaaaaggctaaagctgaagacgttaaacaatttatttttatgagtactatggcagtttatggaaaagaaggtcaggttggtaaatcagatcaaattgatacacaaacaccaatgaaccctacgaccaactatggtatttccaaaaagttcgctgaacaagcattacaagagttgattagtgattcgtttaaagtagcaattgtgagaccaccaatgatttatggtgcacattgcccaggaaatttccaacggttaatgcaattgtcaaagcgattgccaatcattccaaatattaataatcagcggagtgcattatatattaaacatctgacagcatttattgatcaattaatatcattagaagtgacaggcgtgtatcatcctcaagatagtttttactttgatacatcgtcagtaatgtatgaaatacgtcgccaatcgcatcgtaaaacgctattgatcaacatgccttcaatgctaaataagtattttaataagttgtcggtctttagaaaattattcggcaatttaacatacagcaatactttatatgaaaataataatgcgcttgaagttattcctggaaaaatgtcacttgttattgcggacatcatggatgaaacgacaaccaaagataaggcataagtcatctattaaataaaatcaacatacaaatcgttttatttggaggttatagtatgaagttaacagtagttggcttaggttatattggtttaccaacatcaattatgtttgcaaagcatggcgtcgatgtgcttggtgttgatattaatcagcaaacgattgataagttacaaagtggtcaaattagtattgaagaacctggattacaagaggtttatgaagaggtactgtcatcgggaaaattgaaggtatctacaacgccagaagcatctgatgtttttatcattgccgttccgacaccgaataatgatgatcagtaccggtcatgtgacatttcgctagttatgcgtgcattagatagtattttaccatttttagaaaaaggaaataccattattgtagagtcgacaattgcgcctaaaacgatggatgattttgtaaaaccagtcattgaaaatttagggtttacaataggtgaagatatttatttagtgcattgtccagaacgtgtactgccaggaaaaattttagaagaattagttcataacaatcgcatcattggcggtgtgactaaagcttgtattgaagcggggaaacgtgtctatcgcacattcgttcagggagaaatgattgaaacagatgcacgtactgctgaaatgagtaagctaatggaaaacacatatagagacgtgaatattgctttagctaatgaattaacaaaaatttgcaacaacttaaatattaatgtattagatgtgattgaaatggcaaacaaacatccgcgtgttaatatccatcaacctggtccaggtgtaggcggtcattgtttagctgttgatccgtactttattattgctaaagaccctgaaaatgcaaagttaattcaaactggacgtgaaattaataattcaatgccgtcctatgttgttgatacaacgaagcaaatcatcaaagcgttgagcgggaataaagtcacagtatttggtttaacttataaaggtgatgttgatgatataagagaatcaccagcatttgatatttatgagctattaaatcaagaaccagacatagaagtatgtgcttatgatccacatgttgaattagattttgtggaacatgatatgtcacatgctgtcaaagacgcatcgctagtattgattttaagtgaccactcagaatttaaaaatttatcggacagtcattttgataaaatgaagcataaagtgatttttgatacaaaaaatgttgtgaaatcatcatttgaagatgtatcgtattataattatggcaatatatttaattttatcgacaaataaaatgtgtcaaactagggcatacatgattaaggaaagataagctgtcatgtgtttgaacttcagagaggataatgttatgaaaaaaattatggttattttcggtacgagacccgaagcaataaaaatggcaccattagtaaaagaaattgatcataatgggaactttgaagcgaacattgtgattacagcacaacatagagatatgttagatagtgtgttaagtatatttgatattcaagctgatcatgatttaaatattatgcaagatcaacaaacgttagcgggcattacggcgaatgcgcttgctaaacttgatagcatcattaatgaggaacagccggatatgattttagtacatggtgatactacaacgacttttgtaggaagcttggcagcattttatcatcaaattccggtcggacatgtagaagctggacttcgaacacatcagaaatactcaccatttcctgaagagttaaatcgagtcatggtaagtaatattgctgaattgaattttgcgccaacagtaattgcagctaaaaatttactttttgaaaacaaagacaaagagagtatctttattaccggaaatacagttattgacgcattgtcaacaacagttcaaaatgagtttgtttcaacgattattaataaacataaaggcaagaaagttattttactaacagcgcatcgtcgtgaaaatattggagaaccgatgcatcagatttttaaagcagtaagagatttggcagatgaatataaagatgttgtcttcatttatccaatgcatcgtaatccaaaggtaagagcgattgccgaaaaatatttatctgggagaaatcggattgaattaattgagccattagatgcgcttgagttccataattttacaaatcaatcgtacctcgtgctgacagattctggtggtattcaagaggaggctcctacatttggaaaacctgtgttggtattaaggaatcatacagagcgtcccgaaggcgttgaggcgggaacatcgagagtaattggcacagattatgacaatattgttcgaaatgtgaaacaattgattgaggatgatgaagcgtatcaacgtatgagtcaagcgaataatccatatggtgatggacaagcatcacgacgtatttgtgaagcaatagaatattattttggattgcgttcagacaagccggatgaattcgtacctttacgtcgcaaataataaaaaacccctaatcattaagttggtttagacaaccagcggtgactaggggtttttaatatgtttatttttgatagtggtagccaatatcatgtttgaatactttatttgataatattggactttgctgtccatcgtcatcactttttaaacgtacatttttatgagcttctttaaatacatcggaattcaaccaattattaaagctatcttcagattcccaaatagttaagattttaacttcatctgtatccttggtatttaatgttttagtgacaaacatttgttgtaagccttcaatagtttcaataccttgtctattgtaaaaacgttcaatcgtttcttccgcactgcctttttgtaattgtaatctattttctgccataaacatgggcaatcactcctctattttattatttgatttgggtaatgtttttacaaatgtaaagagtacagcggtttgtatgataaccattatgattaatcctatacggactgcaagaacatccaccatataaattgaaaaacctattacaatgtataagctaattaaaattttaattttctgttgtagcgtgtagcctcgatgtaaataaaagttttctacatattctttataaattttttgattaataagccaattgtaaaagcgatctgaacttcgagcaaaacaaaaaactgctacgagtaaaaaaggggtcgttggcagtaaaggtaatacggcacctgcaataccaagcgctgtaaatattaagccaatgacgattaaaataagtcgcattgaaaaaactccattctagtactaatgcgcatgtaatattgttttagtaatataactcatgctaaatataatgtgtatgataagtgcaatgactcagtaagatgaaacgttgttgaattatccttgtcccattaacgcattttaagcgcgactttcataacaaccaaactatttaatgagaattattctcaagtattatagttatattatgtgttttatttttgaaaagtgcaatatgttttcgaaaataagattatttttatgtgcaaaaacgacgcaaaagttttaaaaatgagacttctgtgagctgattattttataaaatgtaaacgcttactatataatgtgaatcatatcgtttaaaagcattattaaatatgatgctaagagatttatattatagccaataaacaaaggagagataatatggcagtaaacgttcgagattatatagcagagaattatggtttatttatcaatggggaatttgttaaaggtagcagtgacgagacaatcgaagtgactaatccagcaactggagaaacactatcacatattacaagagcaaaagataaagatgtcgatcatgcagtcaaagtggcgcaagaggcatttgaatcatggtcattaacttctaaatcagaacgtgcacaaatgttgcgtgatattggtgataaattaatggcacaaaaagataaaattgcaatgattgaaacattaaataatggtaaaccgattcgtgagacaacagcaattgatattccatttgctgcaagacatttccattatttcgcaagtgttattgaaacagaagaaggtacagtgaatgatatcgataaagacacaatgagtatcgtacgacatgagccgattggcgtcgtaggtgctgttgttgcttggaacttcccaatgctattagctgcatggaagattgcgccagccattgctgcaggtaatacaattgtgattcaaccttcgtcttcaacaccattaagtttattggaagttgctaaaattttccaagaggtattacctaatggtgttgtcaatatactaacgggtaaaggttcagaatcaggtaatgcaattttcaatcatgatggggtagataaattatcatttacgggctcaactgatgtaggttatcaagttgccgaagctgcagcgaaacatctagtacctgctactttagagcttggtggtaaaagcgccaatatcatattagatgatgctaatttagaccttgcagttgaaggtattcagttaggtattttattcaaccaaggtgaagtatgtagtgcaggttctcgattattagttcatgaaaaaatttatgatcaattggtgccacgtttacaagaggcattttcaaatattaaagttggagatccacaagatgaagctacacaaatgggtagtcaaactggtaaggatcaattagataaaattcaatcatatattgatgcagcaaaagaatcagatgcacaaattttagcaggtggtcatcgtttaactgaaaatgggttagataaaggattcttctttgaaccaacgttaattgctgtgccagataatcatcataaattagcgcaagaagaaatatttggaccagttttaacagtgattaaagtgaaggatgatcaagaagcaattgatatagctaatgattcagagtatggtttagctggcggcgtattttctcaaaatatcacacgtgcattaaatattgctaaagctgttcgtacaggacgtatttggattaacacttacaaccaagtaccagaaggcgcaccatttggtggttataaaaaatcaggtatcggtcgagaaacttataaaggtgcgttaagtaactatcaacaagttaaaaatatttatattgatacaagcaatgctttaaaaggtttgtactagaataaatatcatttttgaagcgtgtttgtaggcagtctagcggtaagtcttagcatgtttacggagttgtttagattttaagcgaaacaaaatatttaggaacttgcataatgatactaggatataatgactaaaataatagcagtaggatggtttttaattgcaaatcatcttactgctgtttttacttatgctaatttgcgatgcggctattataaggacagagttgtttatgaattaaggtgattttgaaatatgaagttctatatgcaaatgtatcgtttgttttaatatgtggaacaatcataaaatactattgttatttttggacttgatgaaataaaacaaatgaatttgagaaacttttttgtcatttttatgtaattagcacaatcatatcggaaatgtttaaaaatttctatatgatagggataaagcaaagcgcgagtgtgctgtaaaagtttttccaaggtgatattacataaaggtataaagggtaaagattaatgagttgtcatgtaaagtacgatgatgtataaattatggttaattacggaagcattaatactaacctgagaagctataaataattgttattaaaagcaactacattaaatacgacgcatttatttaggagtggcaaactatgaacgggaaaaaggcgaatacgataaacagatacaaatattttcatcatgtcgatcatcaaaaaattcaacaaagttctaaaaagacgctatgggcatcacttatcatcacactattatttacagtgattgaatttgttggaggtttagtatctaattcattagcattgctgtcagactcatttcatatgcttagtgatgtattagcactcggtttgtcaatgttggcaatttattttgctagtaagaagccgactgcacgctacacattcggatatttaagatttgagatattagcggcatttttaaatggtttagcattaattgtaatttcaatctggattttatatgaagctattgtacgtattatttatccgcaacccattgaaagtggcattatgtttatgattgctagtattggtttactcgtcaatattattttgactgttatccttgtaaggtctttaaaacaagaagacaatatcaatattcaaagtgcattatggcatttcatgggagacttattgaactctattggtgtcatcgttgcaattgtattgatctactttacaggatggcgcatcattgacccaatcattagtattgtaatttcactcatcattttacgtggtggttataaaattacgcgtaatgcgtggttaattttaatggaaagtgtgcctcaacatttggatactgatcaaattatagcagatataaaaaacatagatggcatattagatgtacatgaatttcatttgtggagtattacaacagaacattattcattaagtgcccatgttgtgttagataaaaaatatgagggggatgattatcaagcgattgatcaagtatcatcattgttgaaagaaaaatatggcattgcacattcaacgttgcaaattgaaaacttgcaattgaatccattagatgagccatacttcgacaaactaacataaataaaacattgtagcgcctaaaacattaatcaatgtcataggcgcatgtttcgttttatacttatgttgcatcatctaaatgattttcgtcgatgtctttgatggtatctacatctaacacgacatctttaggtttcaaaatatgaatatgtttttcatcatttgtatgtaaaatgcgttctatgatgtacctttgaccggtcattgtttctacagcaatctttttgtttcttgctaaacttgctacgacagattctttatccataatgatagccccctatatatatctttatttacttataccctaacattatttttatactctttgaaaatatattttacagaattttatctaaatatttaaaaaaatcgctcaatatccttgtaatccgataagaattatagtaatatttttttcaaccattgttataggaggtcttattaatgacattatttttattagaagctaacaatcttgattttgcatcaacgaaagaagaactagaagcaaaggcatcatcactatctacgaagacaattccaacattaattgaagtacaagctactgaaaatttaactcatggttattttattgtggaagcaaatgacgaagcagaagctaaacaatttttaacagaagcaggtattagcattcaattagtcaaagaagtacgcttagttggtaaagatttagatgaagtaaaaaatggtgatgcacatgttgattaccttgtaacttggaacattccggaaggcattacgatggatcaatatttagcacgtaaaaagaaaaattctgttcattatgaagaagtgccagaagttgaatttaaacgcacatatgtatgtgaagatatgtctaaatgtatttgtttatacaacgcacctgatgaagaagcggtacgtcgcgcgcgcaaagcagttgatacaccgattgatggcatcgaaaaactttaataagacaacaagttgatgatatatatgtatataggtttggcgtggatttcgattgcagttaattagaatagctcaatgctataaatgtaagtagttgatatgacgaaactaatgaactaaatgcaagttttgtctaaaacaatcattttattgaaatttagtagagctgaaattaatataacgtcgttaattgaataacgcttatgttataagagtactcataccaaaccataatcatctatagatataacaattcacgatttaagggctgtgtttggcatagccctttagatatacatttaattcttattaaaatggtagggattaaaagggggcttgtcatgattaaaatacaacaattacaacatcactttggatcacataaagtaattcataactttaatttggacattagcaagggagaaatagtcacttttatagggaaaagtggttgcgggaagtctactttactcaatatcatcggtggatttattcatccatcatctggtcgtgtcattattgataacgaaattaaacaacagccgtctccagattgtttaatgctatttcaacatcataatctgctgccatggaaaacgattaatgacaacattaggattggattccaacagaaaattagtgatgaagagattaacgcacagcttaaattagttgatttagaaggcagaggaaagcattttcccgagcaactgtccgggggtatgaaacaacgtgtggcactatgtcgagcgcatgtgcataagcctaacgttatattgatggatgagccattaggtgcattagatgcatttacacgctataaacttcaggatcaactagtacaactaaaacataaaacggaatcaactattatcttagtcactcacgatattgatgaagctatttatctttccgaccgcattgttctgttaggtgaagggtgcaatattatttctcaatatgaaattacagcatcacatccacgcagtcgtaatgatagccacctacttaagattcgtaatgaaattatggaaacatttgcattgaatcatcatcaagttgaacctgaatattatttataaggagtgagtgacgatgaaaaggttaagcataatcgtcatcattggaatctttataattacaggatgtgattggcaaagggcgtctaaagaaccgtctaataatgcccaacatcagcaagtgattaaaattggatatttgccgattacacattcagctaatttgatgatgactaaaaaattattatcacaacacaatcatccgaaatataaattagaattagttaaattcaataattggccagatttaatggacgcattaaacagtggtcgtattgatggtgcatcaactttaatagagctcgcgatgaaatcaaagcagaagggctcgaatataaaagctgtggcattggggcatcatgaaggcaatgtcattatgggacaaaaaggtatgcacttaaatgaatttaataataatggcgatgattaccattttggtataccgcatcgttattcaacacattatctcttacttgaagcattacgagaacaattaaagattaaaccggggcattttagctatcatgaaatgtcgccagcagaaatgccagccgcattaagtgaacacagaattacagggtattctgtagccgaaccattcggtgcactgggggaaaagttaggcaaaggtaagactttgaaacatggtgatgacgttatacctgatgcgtattgctgtgtgctagtactgagaggcgaattgcttgatcaacacaaggctgtagcgcaagcatttgcacaagattataaaaagtctggctttaaaatgaatgatcgcaagcaaagtgtagacattatgacgcatcattttaaacaaagtcgtgacgttttaacacagtcagcggcatggacatcctatggtgatttaacaattaagccatccggatatcaagaaattacgacattggtaaaacaacatcatttgtttaatccacctgcatatgatgactttgttgaaccgtcattgtataaggaggcatcacgttcatgacacgtctcacaattaataaaattatattacctattatcacatttattattttcttaggcatttgggaaatggtcattattattgggcattaccaacctgtattgttacctggtcctgctcttgtaggaaaaagcatatggactttcattgttactggagaaattttccaacatttagcaattagtttatggagatttgtagcgggctttgttgtcgcattgttggttgctattccattgggcttcttgcttggaaggaatcgttggctatacaacgctatcgaaccgctatttcaattgattaggccgatatctccgatagcttgggcaccatttgttgttctatggtttggtattggtagtttgccagcgattgcgattatttttatcgctgctttttttccaattgtgttcaataccattaaaggcgttagagacattgaacctcaatatttaaaaatagcggcaaatttaaatttaactgggtggtcattgtatcgcaatatattatttcccggggcatttaaacaaatcatggctgggatacatatggcggtaggaacaagttggatatttttagtttctggtgaaatgattggtgcacaatcgggattaggttttttaatcgttgatgcacgaaatatgttgaacttagaagatgttttagcagcaatattctttatcggattatttggttttattattgatcgattcattagttatattgagcagtttatacttagaagatttggtgaataaggagagatgatgatgactttagaaacacttatcaaagaacaattagatcctcatttagtagaagttgatgaagggacgtattatccgagaacatttatccaacaattatttgtagatggctattttggtgaagcgacactgagaaaaaatgctgaagtaatcgaagctgtatcgcagtcttgtttgacaacaggattttgtttatggtgccaattggctttttcaacgtatttagaaaatgccacacagccacatttaaataatgacttacaacagcaattgttatctggagaaatattaggtgctaccggattgtctaatccgatgaagtcatttaatgatttagaaaagttgaaccttgaacacacttatgttgatggacaattggttgtcagtggacgtatgccagctgtaagtaatattcaagaagaccattattttggtgcgatttcgaagcatgaatcatcagatgaatttgtcatgttcattctacgtgccaatcaagatggtatcacgcttgttgaaaaaacaaattttttaggggtaaacggctcagcaacgtatcaaattactttgaatcaagtcgcagtgccacaatcacaaattatcacgcatgatgcgaagcagtttgcggcaactattcgcccgcaatttattgcttaccaaattccaataggattaggctcaattaaaagttctttagagttaattgatgcattttcaaatgcgcaaaacggaataaatcaatatttagagtatgatgttgaaggttttaaaaaacgctatcgtcaacttagagaggaatattatgcaatattagatgacggtaacttaacttcacatttaaatgaattaatatcattgaagaaggacattggctacttattgttagatgtaaatcaagcttctgttgtcaatggtggttcaagagcgtacacaccatattcgccacaagtacgtaaattaaaagaaggattcttctttgcggcattaacgccaacattaagacatttaggtaaacttgaggcagagttgaaggggtaagtatgatatgctgatttgttgtttagatgcgcttgttgaaacaatttttaaaataatataaatcttagtttataaacattttctgttaatttgttatatccttttaactaggaaaatatacatttcgtaataataatcgttatcattgaaaaagtgttaataaggtgtataatgaaaatgtgaacaattaatgaacttcttattttagagaaggtgaatactatagatacgcatactaaagaacaacaattctcgaatctagtaagatcttatcgtaaagaatacgtgggtaaaggacccaacagtattcgagtgtcgtttaaagataattgggcgattgcacatatgacaggtgttttgagtaaagttgagagtttttacctaaacgacaaacgcaatgaatcgatgctccattatacacgcacagagaagattaaacagatgtataaagaaatagatgtaaatgagatggaaagtgttgtaggcgctaagtttgtaaaattatttacagatattgatttgaatgatgatgaagtcatttcaatatttgttttcgataagtcaatagaataagtgttgctggtgtaaggtacgcggtgctgtttgctaacttcgctttgaatttaacaataattcaagggggtggtatgtcaaacagtgccgttttttttgtcatatttttaaaacaagcaacatgcaacacgtactttaaggaagtcaaaatttatcatttaggagagatggatatgaaaatcgtagcgttatttccagaagcagtagaaggtcaagacaatcaattacttaatactaaaaaagcattaggattaaaaacatttttagaggaaagaggacaagagttcattatattagcagataatggtgaagacttagataaacatttaccagatatggatgtgattattagtgcgccattttatcctgcatatatgactcgtgaacgtattgaaaaagcaccgaacttgaaattagcaattacagcaggtgtaggatctgaccatgtagatttagcggcagcaagtgaacataacattggtgtcgttgaagttacaggaagtaatacagttagtgtggcagaacatgcagttatggatttattaatacttcttagaaactatgaagaaggtcatcgtcaatcagtagaaggtgaatggaacttgtctcaagtaggtaatcatgcgcatgaattacaacacaaaacaattggtatttttggatttggacgaattggacaacttgttgctgaaagattagcgccatttaatgtaacattacaacactatgatccaatcaatcaacaagaccataaattgtctaaatttgtaagctttgatgaacttgtttcaacaagtgatgcgattacaattcatgcaccattaacaccagaaactgataacttatttgataaagatgttttaagtcgtatgaaaaaacacagttatttagtgaatactgcacgtggtaaaattgtaaatcgcgatgcgttagttgaagcgttagcatctgagcatttacaaggatatgctggtgatgtttggtatccacaacctgcacctgctgatcatccatggagaacaatgcctagaaatgctatgacagttcactattcaggtatgactttagaagcacaaaaacgtattgaagatggagttaaagatattttagagcgtttcttcaatcatgaacctttccaagataaagatattattgttgcaagtggtcgtattgctagtaaaagttatacagctaaatagaataaggatgctgggctagcgattaacgctttcaattttatataaatgaatcatataagtactactgctgttgtaaagatggcagtagtttttttatgattacatctaagtatagtcacggctatgttaggacaatgatttaacgtttacgcacatatgtgttcacttacgcaaatgttgataaatttcactcatttggaataatatatagtcatatagtgctaatttttttgaggcattatatgcaagatgcattgtaaagtcgatacatttgtttgttaaataactttgtataactaaaaattctttgcttcaacgtataatcaaataatagattttatataaatggtagtgtgcatatatgtggataggggtgtagttatcaatgaaacgtttaagtacgactttgaaagtacgattgattagcaattttttacagctaattattacgacagcatttataccgtttatagcactatatttaacagatatgttaagtcaatcaattgtcggtatataccttgttggtttagtggttctaaaatttccattgtctattatatctggttaccttattgagatatttccgaaaaagttgctagtacttatttatcaagcgacgatggtgataatgcttgtgttcatgggcatatttgggtcacatcaattgtggcaaattattggtttttgtgttgcatacgccatatttacaattgtttggggattgcaatttccagttatggacacgttaattatggatgcaattaccgaagatgtggaacattatatttacaagattagctattggatgacgaacttatcggtagctattggagcattgttaggtggcttgatgtatggctacagtatgttactgcttttcttaatagcagcttgtatatttttaattgtactgtttattttatatatttggttacctcaagaccgaaatcaagtaaagcaaagtgatgacaagaaacatgcaagtcgttatcaaaaattacaaataatgaatatatttcgcagttataaattagttttgaaagaccgtaattatatgttattgatttcggggttcagtatcatcatgatgggtgaattttcaatctcctcatatattgctattagactaaaggatcagtttgaaacaataagtataggttcatatgatattacaggtgctaagatgttagcaatcttgctaatgattaatacggtcgtcgtcattttactcacgtattcaatctcgaaaattgtattgaaaatagattttaaaaaagctttaatcactggtttgctgatttatattgttggctatagtggtctaacctatcttaatcagtttggcttattagttgtttttatgataattgcgactgtaggtgaaattatttattcgcctatagtttcagaacaacgctttaaaattattcctaaagctaaaagaggaacatatagtgcagttaatgcattaggcattcatttttcagaaacactagctaggttagggattgtgttgggtgctttcttaacgacattacaaatgggactgtatatgtttatagttttaacaattggtgctagcatgcttgttgctggtgtattcgggggacaaaaacaagtgaatacaaattgaatttatttaaatatttattctatgcatctttttatattgaaaacctattaatttggtcgtaattaaaatagagataaatttattaagaatttgttaaaatttaaggataacaattgttttatgcgagttgtttgtttaatataaacttgcttcatggatattttgtaacaacaatattgaacttgcaatgagatatgaataagagaaagtgattaacgagttgtagtgtgctagttatcgaatatgtatgtaatttacattgaaaaatataccaattgtaacgatgatacaagatgtattttagggtagaatatatcgctcatatgttgcgaatggtgttttatattaatcattacataacgagttaattaacatttcgtcggttatcatatcatcatgcaatttcagtaagtaatgagtattatgatatgaaagaaggactttttatgattatgggcaatttgagatttcaacaggaatattttcgtatatacaaaaataatacagaatcaacgacacaccgtaatgcgtattgggttaaactcgctaaaaatattgaagctactaaaatgatgtatgcattatcgacaattgtgcaacaacatgcatctataagacatttttttgatgttactaccgatgacaatttaacaatgatacttcatgaatttctgccttttattgagataaaacaagttccatcttcttccgcaaactatgatttagaagctttttttaagcaagaattaagtacttaccattttaatgattcacctttattcaaatttaaattgtttcagttcgctgatgctgcatatatattattagattttcatgtgtccattttcgatgatagtcaaattgatatttttcttgatgatttatgcaatgcatatcgtggcaatactgttattaacaatactcgacagcatgcacatttaaatagaaatgatgataaagacaatcaagatgcatcgcatatagcattagactcaaactattttcggctagagaataactctgacatccatatcgatagttatttaccaattaagcatccatttgagcaagctttatatcaaacgtatttgattgatgatatgacatcaatagatatggcatcgttggctgttagtgtgtatttagctaatcatataatgagtcaacaacatgatgtcacattaggtatacatgtaccatcacatttaccaaatgatttacacggaaatattgtgccattaacgttaacaatcgatgcaaaagatgtatgtcaacgctttacaacagattttaataaaagtgtgttgcaaaatatgtcgcaattacagtgcgcgaagtcttcgcttttattagagactatttttcattgttatcatcaaatgatgtcttgttgtaatgatgttattgaggatgtacatcaaatacatgatgcacatacatctttagcggatattgaaatttttccacatcaacacgggttcaaaattatatataacagtgcagcatatgatttgctctcaatcgagacgctgagtgacttagttcgtaatatttatttgcaaattactaaagaaaatggaaataaacgaacaactgtagatgaacttaatttgatgacagaacgtgatattcaattatatgacgatatcaatttaagtttacctgagatagatgatgcgcaaacagttgttaccttatttgagcaacaagttgaagcaacaccgaattatgtcgctgtgcaatttgacggagtgtttataacatatcaaacattgaatgcacgcgcgaatgatttagcacaacgtttgagaaaccagtatggtgttgaacctaatgatcgtgtcgctgtcatagctgaaaaaagtattgagatgatagtagcgatgataggtgtgttgaaagctggtggggcttacgtgccaattgatccgaactatccaagtgatcgtcaggagtacattttaaaagatgcaacgcctaaagttgttatcacatatcaagtagtatatgaaaatggtaaacgagatattaatcacattgatttgaacaagatagcgtggaaaaatattgataatctttctaaatgtaacacgttagaagatcatgcgtatgttatttacacgtcggggacaactggtaaccctaaagggacactaattccgcaccgaggtattgttcgcttggtccatcaaaatcattatgtaccattaaatgaaaagacgacgattttgttatcaggaactatagcctttgacgctgcaacatttgaaatatatggtgcattgctaaatggtggaaaactgattgttgctaaaacagaacaattattaaatccaatagcgttagaacaattaatcaatgaaaatgacgtcaatactttgtggttaacctcctcattatttaatcagattgctagtgaacgaatagaagtattggtaccgttaaagtatttattaattggtggagaagtattgaatgctaagtgggtggatttgcttaatcaaagaccgaagcatcctcaaattattaatggttatggaccaactgaaaatacaacatttacaacgacgtataatatacctaacaaagttccaaatcgtattcctattggtaaaccgattcttggtactcatgtttatatcatgcaaggcgagcgtcggtgtggcgttggtattcctggagaattatgtacaagtggctttgggttggctgcaggttatttaaatcagccagaattgacagcagataaatttatcaaagattcaaatataaatcagctgatgtatagaagtggtgatatcgtacgtttgttacccgatggcaacatagattatttatatcgaaaggacaaacaagttaagattcgaggatttaggattgagttgtcagaggttgagcatgcgctcgagcgtatacaaggtattgataaagctgttgttattgttcaaaatcatgatcaagaccagtatatcgttgcttattatgaagcgatgcatacattatcacataataagattaaatcacaattacgtatgaccttacctgagtacatgataccagttaattttatgcatattgagcaaattcctattactattaatgggaaattagataagaaggcattgcctatcatggactatgtcgatacggatgcctatgtagcaccgagtacagataccgaacacttgctatgccaaatttttgcagatattttacatgtgaatcaagtaggtattcatgataatttctttgaattaggtggccattccttaaaagcaacgttagtggtgaatcggatagaggcatctactgggaaacgattacaaattggtgatttattacaaaagccaactgtatttgaactagcgcaagcgattgctaaggttcaagaacaaaactatgaagtgattcctgaagctatagttaaagatgattatgtgttgagctctgcacaaaagcgaatgtatttattatggaaatcaaaccataaagatacggtgtataacataccttttttatggcggttatcatcagaacttaatgtagctcaattgcgacaagcagttcagcatttgatagcgcgacatgagattctacgaacacaatatattgttgtagatgatgaggttcgacaacgtattgtggcagatgttgtagctgactttaaagaagttaacacgcattttacggatgaacaagaaatcatgcgccaatttgtggcaccttttaatttggaaaagccaagccaaattagagtgagatacattcgaagtccattacatgcatacctgtttatagatacacatcatattattaatgatggtatgagtaatatacaattaatgaatgatcttaacgcattatatcaacataaattattgttaccacttaaattgcaatataaagactatagtgaatggatgtcgcatcgtgatatgacgaaacatagacaatattggttatctcaattcaaagatgaagtacctattttaagcttaccgacagactatgttagaccaaatattaaaacgacaaatggagcaatgatgtcatttacaatgaatcaacaaatgagacagctacttcaaaagtatgtagaaaagcatcaaattactgattttatgttctttatgagtgtggtcatgacgttgttaagcagatatgctcgaaaagatgatgttgttgtcggtagtgtcatgagtgcgcgtatgcataaaggcacggagcaaatgctaggcatgtttgctaatacgttggtatatagagggcaaccgtcacttgataaaatgtggacacagtttttacaagaggttaaggaaatgagtttggaggcatacgagcatcaagaatacccattcgaatgtttagtaaatgacttagatcaatcacatgatgcctcacggaatccattatttgatgtcatgttagtactacaaaacaatgaaacgaatcatgctcattttgggcatagtaaattaacacacattcaacccaaatcggtgacggcgaaatttgatttatctttcatcattgaagaagattgcgatgactatacaatcaatatcgagtataataccgatttatatcactcagaaacagttcgtcacatgggtaatcaatgtatgattatgattgattatattttgaagcatcaagatacactacaaattcgtgatataccaaacggcacggaggaacttttaaattgggtcaatacgcatgttaacgatcgaatgcttaatgtcccgggaaataaatctatcataagttactttgatgaagttgtctcacgacaaggtaatcatgttgcgctagtcatgaatgatttgacaatgacgtatgaaacattacacaactatgtagatgctattgcgcacatgctcctatcaaatggtgtgggcaagggtcaacgagttgctttaataacagaacgtagttttgaaatgattgcggcgatgttggcgacagttaaagtaggtgcatcttatatacctatcgatattgattttccgaaaaagcgacaaggtgcaattttggaggatgctaaagtaactgcagtcatgtcttacggcgttgaaattgaaacgacattaccagtcattcaattggaaaatgctaaaggttttgttgaatcaaaggaaaatgaacaatatgatgatttacatggcgatcaactcgaaaacacagcgatgttagataatgagatgtatgctatttacacatctggtacgaccgggatgcctaaaggggttgccatacgacaacgaaatttgttgaatttagtgcatgcatggtcaactgaattgcaattaggcgacaatgaagtatttttgcaacatgcaaatattgtttttgatgcatcagttatggagatttattgttgtttgttaaatggtcatacgcttgtgattccagatagagaggaacgtgttaatccagaacagttacaacaactcattaataagcatcgtgtgacggtggcgtcgattccattacagatgtgtagtgttatggaagacttttatattgaaaaattgattacaggcggggcaactagtacggcatcctttgttaaatatattgagaagcattgtggcacgtatttcaatgcctatggaccatctgagtcaacagtcatcacatcgtattggtcacatcaatgtggtgatttgatacctgagacgattccaattggcaaacccttatctaacatccaagtgtatattatgtcagatggtttgttatgcggtattggtatgccaggcgagttgtgtattgcaggtgatagtttagcgataggatatattaatcgtccggaattaatggctgataaatggcaaaataatccatttggtaaaggaaagttgtatcatagtggtgatttagcacgttatacatctgatggtcaaattgaatttttgggaagaatagataaacaagtgaaagttaacgggtaccgtattgaacttgatgaaattgaaaatgcaatattagctattcgtggtatatctgattgtgttgtcacagttagtcactttgatacgcatgatatattgaatgcttattatgtcggagaacaacaaatggagcaggatttgaagcaatatttaaatgatcatctgcctaagtatatgattcctaagactataacgtatatcgattgtataccattaaccacgaatgacaaggtggatactacgcgtttgccaaatccatcacctatacaacagtctaataaagtatatagcgaaccatctaatgaaattgagcagacatttgttgatgtattcggagaggtattgaaacaaaatgatgtcggtgttgacgatgatttctttgaacttggtggtaactcattagaggcgatgttagttgtctcgcatttaaaacgatttggccatcatatttcaatgcagacattatatcaatataaaaccgtgcgacagattgttaattatatgcaccaaaatcaacaatcattagttgcattaccggataatctttcggaattacaaaagattgttatgtctcgttataatttgggtattttagaggatagtctaagtcatcgacctctaggaaaaacactattgactggcgctacagggtttttaggtgcttatctgattgaagcactacaaggatacagtcatcgcatttattgtttcatacgtgctgataatgaggaaatagcatggtataagttgatgacgaatttaaatgattatttttcagaagagacggttgaaatgatgttatcaaacattgaagtcattgttggtgatttcgagtgtatggatgatgttgttttaccagaaaacatggatacaattattcatgcaggtgctcgtacagatcactttggtgatgatgatgaatttgaaaaagtaaatgttcaaggtactgttgatgtcatacgtttggcacaacaacatcatgcaaggttaatatatgtgtctacgataagtgtgggaacttattttgatatagatacagaagatgtgacattttcagaagcggatgtctataaaggacaactactaacatcaccatatacacggagtaaattttatagtgaattaaaagtattagaagctgtaaaaaatggcttagatggtcgaattgtacgtgttggtaatttgacgagtccatacaatggaagatggcatatgagaaatataaagactaaccgtttttcaatggtaatgaatgatttgttacaactggattgtatcggggttagcctcgctgaaatgcctgtagatttttcttttgtggatacgactgcaagacaaattgtcgcattagcacaggtcaacacgccacaaatcatttaccatgtgttatcacctaataaaatgccggtgaaatctttattagaatgtgttaagtgcaaagaaattgaactcgtcagcgatgaatcatttaatgaaattttacagaaacaagacatgtacgaaacgattggattaactagtgttgaccgtgaacaacaactagcaatgatagatacaaaattaacattaaaaataatggatcacatcagtgaaaaatggccaacgataactaacaattggctgtatcattgggcacaatatatcaaaacaatattcaataagtaagtagggaaagttatgacagtatttgtaatgcaattacagagtaacttgaaaagtattgaagaattaatatcacaaagtcgttggtcatataaaaaaccgcgtacagtcaactatagatacaatcaagataaactcatgcacagattgggagatattttagtgcaatatggaattcaacatgacacagggttattaccacatgaatggcattatcacatttcgccacgaggtaaggcagatatagttcaacacaatcgtgatggacagcccatctatgtgagcttatcatatagttatccttatatcgtgtgtgttgtcgataaagaaccagttggtattgatatcgaaaagatatcacaacgtttagactggcgtacattagtgacgtgtttctctacaaacgaagcacatcaaatatgtagtttaaatgatttttatcaaatatggacacaaaaagaaagttttacaaaattgattggtgaaggtttaatcaaaggattggacatttatgatatgacgcaatcacacttttatcaatcacgtgaagtgaagttcaaacaatttatttttgatcagtttatggtacaggtatgtttcttaggacaggcaccctggggttataaaaaagtgtctgtatttcagttattgagtagttaaacatggcgtctaacagttttatttggcagtgattttaaactatactgcctaaatgtttactgttagatgtttttttattggaaaaatgaaaggtgaatacacgatggcatcattcaaaatcatgacgagattaaagtaagtgataaggtgaaaatatactgagcaatattgaaattgccaaaaataatggcttgttacgacgcatttgagactttaatgctcatgtaagttggctagaattatatcatgtcagttaataaaataacgtgagcatcaatcatcatactcaaacgatgatttaaaactcacgttaatgttagtcagtgtattaatttaatttatagcgatagacaaaatgttgtcgcactaattcaattgtcatcatccagacgatatggccaaagaattctgacagatgctcttggaatggttgatcccacacagcaggtacagtatgcatgattggcataatgataaggtggaataatacccaaatagcaataccaaaaacagcaccttgtcccattgctaagtaagcgtattttttaactaatatgcagtaaataattgcaatgacgatagaaaaactaaagtggacaataaagcttacccaaggcaattgcatatttgaaaatgtatatgtttgatgcgtaaactcactactaaatcctaattgttgcaataactcttgaggtgggttcgttgcattacgttctggtgtgcgaggtggaaacatgacctcccaacctaattttacaattccagataacaagccaccgataattccagcataaatgaatatacccatttgtcgttttgtcaacttaaggactcctctctatttactatcctcattatagtattttgtgaaaataatcacaatgaaaaacttttaaaatataaaatatttcgagttacaaatttgaaaatcacttatagtgtttttcatctcatattgtatcatactgtattctaagaattcttttgtgaaatgagacaggtgaaaaggtgacgctgcataatcattaaacaaattaggtacaactatgtttcgaagccgaaaaatacaagattgagtggtcatattcaaagtcatactgatgattttagtatcgttgtcccaacaaaatcattattgtaaatagcttcgataatatttggcttgtttcctgatgcaatgataactttaggacagccatttttaatagcatttttagcatcaagcactttgggaatcatacctccataaatatcaccatgctcaatatactgattaatatcggctaagggtagttgaggtataacaacatcgttgattagcacgccagcaatattacttagtacataaatgggtgcttctaatgatgctgcaataaaataggcgagtgtgtctgcatttatgttgtaaaattctccatcatggttattgaaaccaatcgaattgatgataggtacaaatttagtacataaataagacaatgagtctatatttaaagtggttggaaccccgacatatccatattgttgatcaaaacgtttaatttcaaataattgagcatccaaaccacataagcctattgcagaacattgctgctggttaaattgagctactaatgcagtgttaacgtctgcaatgagcgtgtgtttagtaatagtcatggttgctttatcagtcactcttaggccattaacaaagtgtgactcgatttgctggtttgataatgcttcattaataaatgggccaccgccgtgaacgataatggggtagatgttgtttgatcgtaaatgcttaatgttgttaataattgatggatgcatgtcacttagtgtactgccaccaattttaatgacaataaatttcatctaaccaacaccaccttatgttcgatatgatgcgttaatacgcacataatcataggataaatcacaaccgtatgcagtcgctgcagcgttacccaaaccaagctgaacgtcaattgtgacattttcatgagttaatgtattcgacatagcttgctcatcaaatagtacagccatacctttatccacgacaggtatttggttcagttgaacatatgtgcagttaggatcaatttcacatccgctatagccaatagctgtaatgattcgaccaaaattggcatcttcgccaaaaatagctgattttactagatttgaacttacgatagttttaccgatttttcttgcgtctgatattgatttagcgcctgaaacattgacactgattaactttgttgcgccttcgccatctctggctatagctttagctaaaaatgtacagacaaaattgaaggcatcaacaaatgtttcccattgtggatggtcttgattaagtatttggtgttcaacttgttgatttgccatgactaataccatgtcatttgtacttgtatcgccatcaacagtaatcatattaaatgtatggtcagtcgaagattttaataattgatgaagtgtattcgattcaattgatgcatcggttgttataaaagcaagcatggtagccatatttgggtgaatcatacctgatcctttagcactgccaccaattgtaatggttttaccatcaatatttagtgatacagcgatatgctttgtacatgtatcagttgttaaaattgcctcgttaaacgcacctggcgttgcaaaattagcatcattaatatgttctgtaccagttttaattttatccattggcaaatattctccaataacaccagttgaagcaacagcaacatgctcagatggtatttgaagttgttgagcaacccatgtttgagtttgttgtgcatcatcgataccttgctgacctgtgcaagaatttgcattagctgaattaacaacaagtgcttgtaatttccctttagacttttgtaaagtgtcttcagtgacaataagtggtgcagctttaaattggtttaaagtatatacggcagctgaacttgctaaagacgatgagtaaatccagccaaagtcttttttgttagcgcgtaaaccgatgtgcataccaccggccgtgaagccttgaggtgtactgatatcgccatgtttaataattgaaaagttatgttgttgtgatgtcgtttcttgatgtttcattctaacaccccttatggataaactggtgattgttttaggccagtcgtaacttcaaaatcatataatatatttaagtttttaatggcttgaccacttgcccctttgacaaggttatcaatcactgatactaaaattgctgtttgcgttgtttcatctacatagataccgatatcgcagtagttactaccgagtacttcttttgtggttggaaaagtcccaatatctctaattctgacaaatggctgattagcataataagaggtcattaatttatgtaatgattcagtcgtatattcagatgataatttgacatatattgttgataaaatacctcgtgtcattggtacgagatgtggtgtaaatatgactgatacatcttgacccgcaatgatagataaatattgctcgatttccggtttgtgtttatggtttccgattgcataagcgcttagattttcattcatttctgaaaaatgaacacgttgtgataatgaacgaccagcacctgacacgccggtcttagcatcaataataatagatgacaaatctacaattttttcgctaataagtggatgtaatgctaataacgttgctgtagggaaacagccagggttagaaatgagtttcgttccattgttatctaaagattgccattctgaaatgctgtaaatagcatgattcaaatcatcttgtgctgcagcagtttctttgtaatatgcttcatatatttcacggtttttaattctgaatgcaccagataaatcaataacatgaattcctttttctactaaaggagggatacatgttttactcacgggtgctggtgtagcaaagaaaattacatcacagtcattattgtccactgtaagtgcttcgaaatgttgcataatatgttgtaaatgtggaaatgttaatttcaacggctcatctacttttgaatgtgagtagatgtgtgcaatcgttacatgaggatgtgtttgtaataatcgaattaattcaattgcgccataaccgctaccgccaacgatacctactttaatcatcatgaatccctcctatatcatatataaatgattaattgttaatttttaaaaacgtcttgaaaagctgcaacaatttgattgatttcctctttatcaatgactagaggtggtgacaatcgaatgatagtacgatgcgtgactttgcataaaatgccacgtttaatcagttgttcaacgaaaggtgcggcatctgtgttaagttcgatgccaataaataaaccacgacctctaatttctttaatactaggatgtttaagttgtagcaacgcttttaataaaaatgaacctaagcgttctgatcgttcaaccagttgttcatctttaagtacatcaagcgctgccgtcgatattgcaatggctaaagggttaccaccaaatgttgagccatgtgtacctggtgttagaactcgcatgacatcattatttgcaagcacagcagatacagggtataagccgccacccaatgccttacctaaaatataaatgtctggaacgacttgctcccattccatcgcaaaccatttcccagttctaccaagaccaacttgaatttcatctgcaatcaataatatttgatgtttatcacatagttgacgcacagcttggatatatcctttcggtggtatattaacgccaccttcaccttgaattggttctaaaataattgctgctgtatttggtgaaatagcttgtgttaattgctcaatatctccaaaatctactgttttagtaccttgaagtagggggtgaaatcctgatttatatgcgtcgtggttagatagtgataatgagccaagtgtacgaccgtgaaaattgttattcatagcgatgatttcaacttgtccgtcagtgatgcctttaacgtcagagccccattttctagcaattttaatggctgcttcaacagcttcagtaccagagttaagggggagtactttgtctttcttagcaagatgacaaattttttcttcccatttcccgagattgtcactataaaggacacgtgaaatgatagacaactttgaagcttgttctgtcatcgctttaacaattgttggatgacaatggccttggtttgcaactgaaaaacccgaaatgcaatctatatattgtttgccatcagtatcccaaactttgccccctttcccttcagtaattacaagcttcagtggtgcataattattagagctataataatcagttaattcaatgattgaattcatcggtcgccctcctttatatttatacaatttaaagaattaatattaatatattacagttgttcaatataagtgtcaaatgtaaatttaataatataaagataaagttgtgtatgcattaatgtgattcgtaaaatgaaagtactaatatttttcgtggataatcattaatatgtatgtatacgagtgcagtttaatgtagtatgaataaaaaatgccacaagcatatgtttaacatatgactgtggcatagtattatgcttgtggaattttacgatgcttaattttataaataatgaagccgataatgaaaccaatcaaactgagaacaacccagcccataccaatgtctgataatggtaaatatttttggctgaaattaatcaaagtttgtgagaatgatgtgcttgaaatgaactctggactagcttttaatccatctactaatgcagcaatcattgtaaagaaaatggtacattgataaataatttttgaatgatggaatttgctgctaaataatgttagtacaatcagggcaattgctaatggatataagaacattaacactgggactgagtacataataattttagttaagccaacattcgcgaataagaatgagataaagctcacaactgttgcaatcgctaggtaattcattttagggaaaaggtgttcaaatgtttctgaaaatgccgtaattaaaccgatagctgtttttaaacaagcaaccataacgatgagtgataacaagacgataccgtagttacctaagtagtattgcgtaatttgcgctaaggcaataccaccattttcactaagtttgaaatgaccaatacttaatgtacccatgattgctagtagggtataaatgatccccatcataatgatactgatagtaccagacttaattgtttctttagcgatatcagttggattttcgatacctaactttttaatcgttgcaacaatgatgataccaaatgccaatgacgctagcgcatctaaggtattgtatccatctaaaaagccgttaaataaggcgtttgattgatattgtttactaataggtgcatcagatatgccacctaatggatggataaaagcaaataataaaataattgctaataatactaagaataccggatttaaaaatttaccgatatattctaaaattcttgatggctttctcgcaaaaaaccatgcaatcacaaagaagacgaagctgaaaataaataaatataaagtgatttgctttggtgataaaaatggcgaaaatgcaatttcaaatgatgtagttgccagtctaggtaaggcgaaaaatggtccgataactagatataaggcaatcgtgaaaatataagcatatgttttattaacacgcgatgcaatttcaaataaaccagatgtctttgaaataccaatagcaatgatacctagaaatggtaagccaattgctgtaattaaaaatcctaagttagcgataaaaacgttagaaccagcagcttgacccaagtgtattgggaagataaggttgccggcaccaaagaataaaccaaataacatagaaccaataaacatgttttctttaaatgttagtttcttcttcatatatgtatttgttctcctttttagaacttataaaaatctacttaattaagataatatcaaaaattaaacctaaagtgatacataattttgtaataaatactaaattttttgaaaattccggaataaatactgttttttatgtagtaagggcataggttaagaacggtttaacagatatagaatatgtttatatagtggaggttagacaacccgacgtattaatacattgtgaaataaagatacccccttcaatataatcgaagggggaagtgaatgtttagttcaatatatttagcaagtcgtttgtggttatggtttgtcccatcaatgggaatacattatctattgggaattgatgtagcgtttcgttttgtgcactcatcatatctgtaacaaaatactgatcgtagtttaattgataggcgtctcgtgctgtcgtatctacaccaacatgtgttgctacaccgccaagaacaattgtatcaattcctcgacgtctcaactgtaagtctaaatccgttcctacaaatgcactaaattgtcgtttatctatgacaaaatcgtcatctcttttgtctagtaaataatggaaatggctgtagtcatcgccttcttttggtggtaatgagatcattgcatttggttgcaatgcatctttaccatcatagaaattcacgcgaacaaaggcgataaagccattgttttttctaaaagcttcaattaatttgttagcattttgaacaacattttcagctgtatgtggcgcataatccattttaagaataccttgttgcaggtcgattaacactaaagcggttttatcaaaattaatcatcttatatcagagtccttttcatttaataatatattcgcttaaacttataccctgaatacgatgaaattatttattttgttgtgaaaaagctttagcaatatcgatcagtttcttcggtgcatcttcgacagacattttgacttcgacaaaatacatcacatcgggatggccattaattgtattaaatacctcttgtaaatcttttgatgattcaacgtcatgaatttcaacatttttaccaccaaatacagctggtaaagctttataatcccacatgtgaatttcattataaggttcatacatgccgtgaataagtcgttctaccgtatagccgtcattattaatcacaaataataccggtttaatatgctgtctaatcatagttgaaatagcttgaacagttagttgcaatgagccatcgccaattaataataagttacgacgatctttgtctgctaattgtgaacctaatgttgcaggtaatgtatagccgatagaaccccataacggttgccctataaaagtattgcttttgtataatgctaaatcataagcaccaaaaaatgatgtaccttgatcagcaataatgacatcatttggttttaagaaattttgcatcattttaaaataagtttgttgtgttaatggttctgtgccaacagtataatcgggtgatgttggacgatgatatgcaggaaacgatgcgttattcgtatatgatatatcggtcaattgttgtagtaatgatgatagagatatttcatcatttgtaacatcatcaattttgatattgtgatgatttaacataacgacatcatcgatattgaattggtatgaaaatcctgctgttgctgaatctgttaatttggctccaatatttaaaattaaatcgctgttgtccacataatctcgtattttatcttcggcaattttcccatcgtaaatacccatataatatggattttcctcattaaaagcaccttttcctaatgaaagttgtgctactggtatctgtgtttgatttacaaaatcttctaattcttgatggaggtgaaaactgttaatttcatgtccagtaatgatgataggctgcttcgattgatgcaatttagatactaataactctatatatgttgatgcatcagtatctttggctgccgttacttcgaatggtgtcggtatctcaatttcagagattgcgacatcgattggtaaatgtaaatgaactgggcgtctttcggcgattgctgtattaattaagcgtggtatttcagttgctgcattttcaggtgtgatataaccttgtgcaacggttatatgtgcaaacatttttcggtagtcgtcaaatgtaccttcaccaagtgagtgatgtacatatttaccggcttgttcaacagcacgtgtcggcgcacctgtaatcgcaatgacaggtatgcgttcagcatacgaacctgcgataccgttgacggcacttaattcgccaacaccaaatgtagtaactaatgcagcgagtccattaagacgggcataaccgtccgctgcgtaacttgcgtttaattcatttgtatttcctacccaatctacattgggattactgataatatcgtctagaaaagcgagattaaaatcaccaggaacaccaaaaattttatcgacgcctgctcgatgaatagcgtcaattaagtaagctccaatgcgttgtttcataaaaaaaccaccttttctctatatttacacttaaaatgatagcctcgaatatagtgtaaggtcaaggaagttgactttgttgtgaaaacgctaacaatattgagcaattaatattttttaggaaatgagtatgaagggggatttaattgatgattttaaaattcaaaatttaaggggagagcgaactatcaatgatgctgcaaaacacaattgcaatgaaaaaacaggcgcgtcaccttatgaaggtatacgcacctgtttatagtaagcattatttagcttcaaataattgatcgccaaatgaaatgttgccatgttcaccttgtttaaaatcaaggtttgtaatgtttccttgtgtaacgataataggcgtaatatcactctttgcatgattgcggatgtagtctaaatcaaagttgattaataaatcaccttgtttaacttcttgaccttcctcaacatgtaaagtaaagccttctccgtttaatttaacagtgtctaaaccgatgtggattaatagttctaaaccactatctgatacaagaccaattgcatgttttgttgggaaaatcatttgtactttaccgttgaatggtgcacgaacttcaccttgtgaaggtttaatagcgataccgtcacccatcattttttcgctgaacacttgatcaggcacttctgataatggtgttacttcaccagttaatggtgcatgcacgatatggctcaattcgcttgttgcagatttatcttctgcaacaacaacggtttcgtctttatcgtcttccatagtagtagggttttctactacttgaccattcataatctgttgcatttcatgtttgatttggtcagattttggaccaaaaattgcttgcatattattgccgacttctaatacaccagatgcgcctaaatctttcaaaccaggaacatcaactttagatttgtcgttaacttcaacacgtagacgtgtgatacaagcgtctaaatgtttaatgtttgctttgccacccatagcttctaatactgcatatggtaattcagttgctgaagcagtagccgcttgtgattgtttatcttcacgacctggtgttttgtattttaattttacaattaggaatcggaatacgaagtagtaaatgactgcgtatacaagacctacaggaatgactaaccaccattgtgtcttattaggtagtataccgagtaagaagtagtcgatgaaaccacctgagaatgtataacctagatgaagatctaataagtacaatgttaagaatgataaaccatcaagtactgcgtgaataaagaataataatggtgctacgaataagaatgagaattctaaaggttctgtaataccagttaagaatgatgttaaagcagcagaacccattaaaccggctactactttcttgttttcaggtttagctgtgtgataaattgctaaagctgctgcaggtaaaccgaacatcataacagggaattcaccttgcatgaatttaccagctgttaaatgtgcaccttcacgaatttgttcgataaagatacgttggtcaccgtgaataatttcacctgctgcatttttccatgaaccaaactcgaaccagaacggtgcgtggaaaatgtgatgtagaccgaatggaattaataaacgcttgatgaaaccaaataagaatacggcaacaccagtatttgagtctaataatcctgtactgaatgcatttaatcctgtttggattgttggccagattaatgccattgggaatgctaaaataaatgatgttgtagccatcataataggtacgaaacgcttaccagcgaagaaacctaaataagatggtaagttaatgttatagaacttgttataacaccaagctgccagggccccgattataataccgccgaacacacctgtttgtaatgttgggatacctaaaatgctagcgtaaccactcgctggatcaccaatgttcttaggtgttacttgtaaaaagtcacccattgttttgttcatgattatgtaaccgacgaatgctgcgatagctgctacaccatcaccgccagctaatccgattgcgacacctaatgcgaaaatcataggcaagttatcaaaaatgataccaccagcacctgtcattaatttagcgacagtttgtacgccaccattttgtataaaaggcaagtagtgttgtaatgcttcgccttgcatagctgtaccgatagctaataacagacccgctgctggtaaaatcgcaacaggtaacattagtgccttaccaatacgttgcaattgaccgaaaagtttcttcctcacttgtccaacctccaaagttgtatttattatttaagattcaataaaaaagacacgagcaaatagactgtgttggtaaccatcacagcttaatttaactcatgcctaatcttacttagtaacacgttggtgtatgtaattaatgtaaaagaagcaattgactaagtagtatataaaacggatacgttagtttatctagcttaccatcacatcttattgaatcttatttgtttgcgactcctattttagcatggtgaagtatgcgttttcaatacaattattaaattcaatttcaaatctcttaattgttcacagattattattaaaacataatataagataatcctgaataaaatgtataaaagttgttgtaacaattcagcaatagcaactgttttcgagcgttaaatgataagaaaaatatgtcgtttaaaaaaattaacttgtgacagaaatatgtaagattattacaatgaacaggctttatctgattaatattgtaatgtgttttctcttatagtaaaatgtaagcgattacacaactcaactatattttcctaataattatattgttaaggagggctactttgacaggcttttcagtgtatttaggacaacctttagatgaagcgtatattaagcgaatgattaaacaaggttaccaaatgatttttacatctgtacaaataccagaagaagatgacgagacaaaatatcattatttcacaaaactactcaatttattaaaacatgaacaagtgacttacctcatagatgctaatccatctatattaacaccatctttttatgagcatcttcgacaatatgatgcacaatttatgattcgtatcgatcatagtacatcaattgaggcaatcgaagcgataatggcacagggtttaaagtgctgtttgaatgcaagtattatttcccgggaattgttaacaagcttacatcaacaattgaatgattttacattactttcattttgtcataactattatccaagaccagatacgggattatctgttgacttggtcaataagaaaaatgaactcatttatcaatttaatccaaaggcacaaatatatggttttattgtagggagtggtttgcgaggtcctttgcataaaggcttgccaacaattgaagcaacgagacatagtcatcctgtcgttgcagctaaattattacaagaaactggtgtatctgaagtgttagttggagactcattgattgaaataaggcaggcaaaacaacttatagatttttgtaagcataggcatttcacgttatgtattgaagaagtgtttgatacgacagtgacttaccttttcgatatgtgtcataaagtacgtccggataatccggagaatgtcattcgttcggaaacgtcaagacaaatatgtccgcattcgattcaaccacagtttacgacgcaacgacgcattggtttagtaaccgttgataatttgaataacggacgttatcaaggtgaaatgcaaattgtgagacaaacgcttagtgcacatgacagtgtgaatgttgttgcacaaattattaaagaagacttaccactgttaagttgtatcgagccgaatgatacatttgattttcaaaaaactagggagtgtaagaagtgatggaaaatagtacgaccgaagcgcgtaatgaagcgacgatgcatcttgatgaaatgactgtggaagaggcattaattacgatgaataaagaagatcagcaagtcccgttagcagttcgaaaggcaataccacaattgacaaaagtaattaaaaaaacaattgcacagtataaaaagggtggacgattgatctatatcggtgcaggtacaagtggacgattgggtgtcttagatgcagcggagtgtgtacctacattcaatactgatcctcatgaaattataggtattattgctggtggacaacatgctatgacgatggctgtagaaggtgcggaagatcacaaaaaattagcggaagaagatttgaaaaatatagatttaacatcaaaagatgtcgttataggaattgccgcgagtggcaaaacgccatatgttataggcggtttaacatttgctaatacaatcggtgctacaacagtatctatttcatgcaatgaacatgcagttataagtgaaattgcgcagtatccagtagaagttaaagttggtccagaagtattaactggttcaacgcgtttaaagtctggtacagcacaaaaattaattttaaatatgatttcaaccatcacaatggttggtgtcggaaaagtttacgataacctcatgattgatgttaaagcaaccaatcaaaaactgatcgaccgttcagtgcgtaatattcaagaaatatgtgctatcacatatgatgaagcaatggcgttatatcaggtatctgagcatgatgtgaaagttgcgacagttatgggtatgtgtggcatttctaaggaagaagcaacaagacggttattaaacaatggtgacattgttaaacgagcaatcagagatagacaaccttaggagggatttaaatgaccaaagaacaacaacttgcagaacgaattattgctgcagtaggtggtatggataatatagatagtgtcatgaactgtatgacacgtgtgcgtattaaagtattagatgaaaataaagtagatgaccaagaactaaggcacattgatggtgtcatgggtgttatacacgatgaacgcattcaagttgtagttggacctggtacagtcaataaagtggctaatcatatggctgagttaagtggtgttaaactaggtgacccaataccacacaatcacaatgatagtgaaaaaatggactataaatcatatgcagctgataaagcaaaggcaaataaagaagcacataaagcaaaacaaaagaatggtaagttgaataaagtattgaaatcaattgccaatatctttataccgttgattcctgcatttattggagctggattaattggtggtattgcagcagtactgagtaacttaatggtggcaggctatatttcaggtgcttggattacgcaacttataacagtatttaatgtcattaaagacggtatgttagcatacttagctattttcactggtattaatgcggctaaagaatttggtgcgacaccaggacttggtggcgtgattggtggtacaacgttattaacgggtattgctggtaaaaatattttaatgaatgttttcactggagaaccattgcaacctggacaaggtggaattattggtgttatttttgccgtttggattttaagtattgtcgaaaagagattgcataaaattgtgccaaatgcgattgatattattgtaacgccgactattgcattgttgattgtaggactattaactatctttatctttatgccattagcaggttttgtttcagacagtttagtttcagtagttaacggaattattagtattggtggcgtatttagtggatttatcattggtgcaagcttcctaccgttagttatgttagggcttcatcatatttttacgccaattcatatagaaatgattaaccaatctggtgctacttacttattgccaattgcagcgatggctggtgctggacaagtaggtgccgcattagcactttgggtaagatgtaaacgcaacacaacattacgtaatactttaaaaggtgcattgccagttggtttcctaggtattggagaaccattaatctatggtgtgactttgccattaggtcgacctttcttaactgcttgtattggcggtggtattggtggcgctgtaataggtggaattggacatattggtgccaaagcaataggcccaagtggtgtgtcactattaccattaatctcagataatatgtatttaggttatattgcaggattacttgctgcgtatgctggtggattcgtttgtacatatttatttggaacgacaaaggcgatgcgacagacagatttgttgggtgattaatgatgacaaatattttatatcgcattgataagcagttgagtgattttacgaagacagaaaagataatcgctgattacattttaaagaatccacataaaatcattgatatgactgtgaatgatttagcagatgttacgaatgttagtacagcatcaattgttagatttagtcggaaaatgacacatcaaggttttcaagagctaaagattgcgatatctcgatacttacccgaagatattgcaaccaatccacatttagaattgattgaaaatgaatctgtagaaactttgaaaaataaaatgattgctagagcaacgaatacgatgcgatttgtagctactaatattatggatgcgcaaattgatgcaatttgtgatgtgttgaaaaatgccaggacaatatttttatttggatttggcgcatcgagtttgactattggtgatctttttcaaaagttatctcgtattggcttaaatgtcaggttattacatgaaacgcatttacttgtgtcaacatttgcgacgcatgatgatagagattgcatgatttttgtgacgaatcaaggtagtcatagtgaattgcagtcaattgcacaggtggccacacattacagtattcccatcataactatatctagtacagctaataatccagtggctcaaattgcagactatgcattgatttatggcagaactgatgaaaatgaaatgcgtatggcggctacaacgtcactatttgcacagttattcacggtagatatattgtactatcgatttgtagcattaaattatcatgcgattctagattgtataacccaatcgaaaatggcacttgataattacaggaagcatcttgcgacgatagattttaaacattagatattgtgtgcgttctaatataaagttagttgcaacgtaaacaattgaagtttttgatgtgatttagttgcttgatgaaaaattgttgatacaagtttgtaaaactggcatagaagttattttgaaaatgataaaagtgtgacaaattaaagcaaagttcaggtttgagctttgcttttttcatagtatagaaattaaatgttgaagaataattttaatgctaaatgaactaatacgaaggtgctaaaagtaattattatcaaattagtgatatgaatgaaatgtttaaatcgtttgcgttgattgtattcgggacttttatagagtaggtagtagtacataaagagtatggctgcgaacatgccgaatattgaagtgaagttacctacagtgactgccatgaaatgatttaaagttaaataataacttagactgataattaaaaataaaatgatttgataggtaattaacaccattcaagtccctccattaatcgtaggcaaaaaatttatcaatgatttgattatttgtattcaaattttagtatacgacttacctcaaacacaaatattaaaatataagacaataaaattagaataaatttacgtttgaagataaaaaacaaacatttttcattaaagtttatgatatatttagagcaatagaaagtgtatggaaggggatatgaatggcataccaaagtgaatacgcattagaaaatgaaatgatgaatcaacttgaacaattgggttacgaaagagtaacgatacgtgataataagcaattgcttgataattttagaacgattttaaatgagcgtcatgcggacaaattagaaggcaatcccttaacagataaagaatttcaacgtctgttaacgatgattgatgggaaaagtattttcgaaagtgcccgtattttacgtgataaattaccacttagacgtgatgatgagtctgagatttatttgtcgtttttagatacgaaaagttggtgtaaaaataagtttcaagtgacgaatcaagtatcggtcgaggatacatataaagcacgttatgatgtaacgatattaatcaacggactaccccttgtccaagttgaattgaaacgtcgaggcattgatattaatgaggcgtttaaccaagtaaaacgttaccgtaaacaaaattacacaggcttattccgctacatacaaatgtttatcattagtaatggtgttgaaacgcgatacttttctaataatgatagcgaactattgaagagtcacatgttttattggagtgataaacagaataaccgaatcaatacattgcaatcgtttgctgagtcatttatgagaccttgtcaattagctaagatgatatcacgctatatgattattaatgaaacagatagaatactgatggcaatgcgtccgtatcaagtgtatgcggtagaagcacttattcaacaagcgactgagacagggaataatggatatgtgtggcatacaacgggaagtggtaagacgttgacttcttttaaagcgagtcagattttatcacaacaagatgacattaagaaagttatctttttggttgaccgtaaagacttggatagtcaaacagaagaggaatttaataaatttgctaagggtgctgtcgacaaaacatttaatacctcgcaactggtacgccaactaaatgataaaagtttgccacttattgtaacgacgattcaaaaaatggctaaagcgattcaaggtaatgcccatttattagaacagtataaaacaaataaagttgtatttattattgatgagtgtcatcgcagtcaatttggtgacatgcatcgtctagttaaacaacatttcaaaaatgcccaatattttgggttcactggtacgccacgtttcccagaaaatagtagtcaagatggtagaacaactgcagatatttttggtagatgtttacatacgtatttaattagagatgccattcatgatggtaatgtacttggtttctcagttgactatattaatacttttaaaaataaagctttaaaagcagaagataacagcatggttgaagcaattgatacggaagaagtatggttagcggataaacgtgtggaattagtaacacgacatatcatcaataatcatgataaatatacacgtaatcgtcaatattcaagtatatttacagttcaaagtattcacgcgcttattaaatattatgagacatttaagcgacttaacaaaaagttggaacaaccattaacggtagctggtatatttacgtttaaacctaatgaagatgatcgtgatggtgaagtgccatatcattcacgtgaaaaattagagataatgattagtgattataataaaaagttcgagacgaatttttcaacagacacaactaatgagtattttaaccatatttcaaaaaacgttaaaaagggcgttaaagatagtaaaattgatatcttaatcgttgttaatatgttcttaactggttttgatagtaaagtactgaacactttatatgttgataagaatttaatgtatcatgatttaattcaagcgtattcacgtacaaatagggttgaaaaagaatcaaagccatttggtaaaattgtaaactatcgtgacttgaaaaaagagacagacgatgcactgagagtattctcacaaacaaatgatacggatacaattttaatgcgtagttatgaagagtataaaaaagaatttattgacgcttatcgtgagcttaaaatgattgtgccgacaccacacatggttgatgacattcaagatgaagaagagctaaagcgctttgttgaagcttatcgtttattagctaaaataatattacgtttaaaagcatttgacgagtttgagtttacaattgatgaaattggaatggatgaacaagagaatgaagactataaaagtaaatatttagccgtgtacgatcaagtaaaaagagcgacggctgagaaaaataaagtatccattttaaatgatattgatttcgaaatagaaatgatgcgtaatgatacgattaatgtgaattatattatgaatatattgagacaaattgatcttgaagacaaagcggaacaacgtcgtaaccaagaacaaattagacgtattttagatcatgcagatgatccgacattgaggttaaaacgagatctaattagagaattcatcgacaatgttgtaccttctttaaataaggatgatgatatcgatcaagaatatgttaatttcgaaagtattaaaaaagaagcggagttcaaaggatttgctggagagagatctatcgatgaacaagccctaaaaacaatttcaaatgactaccagtatagtggtgttgtaaacccacatcaccttaaaaaaatgattggtgatttgccattgaaagaaaaacgtaaagcaagaaaagccattgaatctttcgtggcagaaacaactgaaaaatacggtgtgtaatgattcagccccctcgctagattagtgtagggggcattattatttcattagaaaaggctcatgtgtttggcaatcatcatttggtttcaatacaattttatcatcgtatttgtatagaaataatgtctataggcatttaaaatagtttataatattaacaggataagtattaaatgtatgttgaaggaggtgcgtagctatggataatagaaatatgattaatcgtgtttttagtcaaaagatattacatcaaattgcaatcaaaaataaaagtgatgttgttgatgaggcatatgatttttatatacaagggcctaaaaatatcaatgtaatacagaaaatgaagtctttatataactatcttaaaaagtcttatcgtaacgaatatttttataaaaacacaatgcttaataaactccttttaggactacattctgttaatacaactactgcactttctgagatgcctataggaaatagtattgctgattttatattgttaaatggtaaaggcgttgtctacgagattaaaacagaattagataagttggatagattggataatcaaattaatgattattatgaagtatttaattatgtagtagtcattacaaatgacaaacacttgaataaagttatggctagatacaaagatacaacagtcggaattttagtattaacatctagaaatacactgagtgaagttcaaaaaccaaaagaaaacaatagtctcttaaactcaaaagcgatgtacaactttttacgaaaagaagaaagaaaaagagttattgcacaaaatcatatggatgtgccaacttataatgatttcacagagtatgatgtgttatttgacgtgtttaaagaaataccaatgacgaaactgcataacaatatgatttttgagttgaaaaaaagaggcaacatgaaagaatacaaagatgaatttttagcagctccgactgaaattaagttcttgttatatttcgcaaaaatgacaaagaaagataaaaataaactatatcattttcttaaggatacaaataatcccccgcacttcacatagtggcgggggatttatcatgcgttaaaatgcccaaagtatgggtgtgacccttaaatcatggcaaagcatctaacacttgatatggtgccgagccctaacatagcacaatatagttagtatgacaaagtcatctaacataacacatcagatgttgcccgatttattccagaccatacagtgataaagttgcacaacgcatgacttttatttagcaataactgctacttctgaaataagtttctttgcatagtctgattgcggatgtttgataatatcttctgtgttattaagttcaacgatttcgccatttttcataactgcaactcgatcacatatttcattgataacacccatgtcatgtgtgatgaataaataagtgatgccgaagtctaactgtaattgttttaataactcgatgatatctttttgaattgaaacgtctaaagctgatactgcctcgtcgcaaacaatcactttaggttctacagcaagtgctcttgcgatacttacacgctggcgttgcccaccagataattcgtgtggatagcgatataagaaactttgatctaggccaactttttctaacaacgatacgatagttttaataatgtcgtcattatctttgactttcccatgaatgattagtggtcgtttaatcacatcaatgactttaaatcttggattaatagatgcgaatggatcttggaaaatcatttgtatctcttgtcgtaaagatttcaattcatcatctttaaataaacttaatggtaattcgttataccaaataaagccttctgacacttcctttagaccgacgaccgtcttagctaatgtcgatttccctgaccctgattcaccgacaatgcctaacgtttcgccttttctaatatccaagttaatatcattaactgctcggtataggctgccactcggtgatgtgtaatccacgctcacgcgatcgaattttaataaaatatcattgtttaacggtcttggcggacgcgtttgatgaatatcaggaatcgcatctattaagcgtttcgtataggtatgttgtggcgatttaaaaatactttcaaccgtgccactttcaacgacacttccatctttcattacaatcacatcgtcgcaaaattgatacacagcacctaaatcgtgagtgataaaaataatagacgtttctgtgtactcataaagggacttcattaactgcagtaattgattttgtgtactggcatctaatgccgttgttggttcatctgcgattaaaatttgtggctttaaaatcaatgccattgctatcatgacacgttgacgcataccaccagaaagttcatgcggataagcatcaaattgtcgagttgcatgttttatacctactttttctaaaatgtctattgtcatcgactttgcttcagatttagatacacgtttatgttgaaatagtacttctgtaatttgtttgccaatcgttaatcttggattcaacgaagagagtggatcttgaaaaatcattgaaatatccttgcctcgaatttgttgtaacgctgaagttgataaattagttaacgattgcccattaaaaataatttctcctgttaacgtgtgatccggataatctggtagtagccctaaaatagatttagcggtaatactttttcctgatcctgattcaccaacaatacctaggatatgtttttttcgtaattcgaaagagacgttttttaccgcttgaactgtagtttcatcataattgaattgtacattcagactgttgacttctaataaatttgacatgatgttgtgcctccctattcacaaatgtgtaaatttattctatacttttgtatatcatagtaatctactcaagattattttacaaggagtgattagcataattacttatttagaatcttttaagtcgttgtatcacaaggcattttacaagtttgtattatcggtattaagcttgccattatttttatatgcagtgataaagtttttcttttctgctaagagaaaaaatttttacgctaataattctgaaatttcagaaatcgaacaggcgttacatcaaaaatataaatatttatcgcagcaaaagtcatccacacaaatacataaagaagcattaaaaatattcaagacacaaagttctaatacgaattcaaagaatattgaacaagcacatttttcaacatactttgaaaatgtattatttcataagttcatcattatcaaagtgatattggcgttaccgatgttcatcttattgactatttatttacagccattagttagatatatttttgagcgaattgtcatggctgtgattgtcatcattggtgttattgtcagtgtgtttagcattctgtatttttcaccgcttgatgcggcttatagcatactgggacaaaatgcaacaaaggcacagatacatcaattcaatgtattacatcatcttaacgaaccttattttattcaattgtgggataccatcaagggtgtttttacctttgacttaggtacgacttacaaagggaatgatgttgtgactaaagcagttggcgaaagaattccaattacaataattgtcgcagtattagcgctaattgtggcattaattattgcaataccaattggtattatcagtgcgatgaagcgaaatagttggcttgatatcacgttaatgataattgcattaattggtttgtctattccaagtttctggcaagggttattattcattttagcgttctcattgaaattggatattttgccaccatcttatatgccagaacatccaatatcgttgattttacctgtacttgtcattggaacaagtattgctgcttctatcacgcgtatgacaaggtcttctgtacttgaagtaatgcgcagcgattatgttttaactgcttatgcaaaaggattatcgacgacacaagtggttattaaacatattttgaaaaatgccattattccaattgtaacgctagttggtcttctagtggcagagttactaggcggttcagcagtgacggagcaagtatttaacattaatggtatcggtcgttatatcgtccaaaaacaactaatacctgatatcccagcagtcatgggtggggtcgtatatatatcaattgtaatatctttagcaaacttaattattgatatattttatgctttaatcgatccaaaattacgtagtgaaattaacgaaaggaagtgaggcatatggtaaaacttacaacaaagatagcttccttaaaactattcgcaagttatgctattgcaacttatattttagttatattaacgagtgcattaaatctttttaaaggttatgtggccgatacgttctatattgctgaaacattgctaatcgttttaaccatcattttaattatcatcttaacaacggaacaaacatggaagcatcatgacctatggcgacgtatcgtcgaagtgttgttattgttgatgacattaacagggaacgtatttacattattaatgtttgtaagtattagacgttaccaacgtacatcgcaaatacatagttataatggctgggaatcgtttatacgaaaaactactagacatcgtattgcgattatcgggttacttattttagtctatatgctgacattatcaattgtgtcacaatttacatttgatacgacattggctactaaaaatcagttcaacgcactgttacatggaccgagtctagcctatccgtttggtactgatgatttcggtagagacttatttacacgcgtagttgtcggaacgaagctgacattttcaatttcaattatttcagtagttattgcagttgtttttggtgtgttactaggcactatcgcaggttattttaatcatattgataatttaataatgcgaattttagatgtagtgtttgcaattccatcattattgttagcggtggcaattattgcatcgtttggagcaagtattccaaatttaattattgctttaagtatcggtaatataccatcatttgcacggacaatgcgtgccagtgttttagaaattaaacgcatggaatatgtagatgcagcacgtatcactggtgaaaacacttggaatatcatatggcgttatattttgccgaatgcgattgcgcctatgattgtacgtttttcattaaatataggtgtggttgtattaacaacaagtagtttaagtttcctaggacttggtgttacacctgatgtagctgaatggggcaacattttacgtaccggtagtaactacttggaaacgcacagtaatttagctattgtacctggtatttgtattatgttcgtcgttttagcatttaattttataggtgatgcagtgcgtgatgcgctagatccaagaattcattaaaaaggtagggatagatgtgaagaaaatcattagtatcgcaattatagttttagcgttggtattaagtggttgtggtgtccctacgaaatcagaagtggctcaaaagtcatcgaaagttgaagtgaaaggcgagcgaccaacgatacatttcctaggacaagcaagttatgaaaatgatatgaatatcgtcaaagatcaattggaaaatgcaggatttaacgtgaagatgaatatccaaccagattatggtagctatcgtacacaacgtcaagccggcaattatgatatccaaatcgatgactggatgacagtattcggtgacccgaactatgctatgacggcattatttagttctacaggatcaaatagtttattgaaagataaacatgtagaccagttgttaaataaagcttctactcaaaatgaagcagatgttaaacaaacatataagcaaattgaagatgaagttgtatttgataaagggtatatggcgcctttatatggatcaaaaaagaatttagtatatgacaataaagtgttagataaaaatagtgttggattgccaaattcacgtgcattaatatggcaacaatttgattacaacaatagtagagaacgagatacgcggccacttgtgatgacacaacaagacggtgaaattcctacattggatccaatacgttcaattgcgccgtcagtatattcaattaatatgaatatgtacacaaggttattattattagatgaaaatgaccacttaacaacgaaaggttcgttaagtcgtgattatgctgtgaataaggacaataaagcgttttatttcttattaagagatgatgattattttgcgaaagtggttaatggacaagcacgtaatactggagagcatgtatcggctgaagatgttaagttttctttagatagagcacgtgataaaaagtctgtgcctaacaataatacttacaatatgcacaaacatataaatgacatcaagatattaaaagatgaggacatcgatcagttgcgtaaagagaaggacaaggacgataattccatctatgataagttgattaaagcgtataacgtcaaatcgttaacgacagatggtcaaaaagtaaataataaagacggtatttatcaaattgttaaaattacgacagatcaatcgatgcctcgagaggtaaattacttaacacactcttcggcaggcattttatctaaaaaatttgttaatcaagtaaatcaagaatatccaaaaggatatggggatagcagtaccattcctgcaaattcagatggaaaaaatgcgctttatgcaagtggcgcatacattatgacacagaaaaatgcatatcaagcaacgtttcaacgtaatccaggattcaacgaaacagaaaaaggtagttatggaccagctaaaattaaaaatattacattgaagtttaatggtgacccgaataatgcattgtcagaacttagaaatcattcaattgatatgttggcagatgtgaatcaaaaacattttgatttaattaagtcggataaaaatttaagcattattcgcaaaaatggacgtaagtcagtctttttaatgctaaatattaaaaaaggtatatttaagacgcatccaaacttgagacaagcagtagttaatgcgatagatcaggatcaatttattaagttttatcgtggcgataaatttaaaattgcatcaccgattacaccacttgtcgatactggtaacgagcaacgtcaagatttagaaaaagtagaaaaagccattaatcaataatgttttaaatatttaacagaaagtaggaggatatagtatggtcattaacttaaatgacaaacagacaaaaacatctaaagaagggttaatttccgtatcacatcctcttgcggctaaaattggtaaggatgtattagatcaaggtggcaacgctatggatgccgtgattgcaattcaactggcattgaatgtggtagaaccatttgcatcaggtattggtggtggcgggtacttgctatattatgagcaaagtactggcagtataactgcgtttgatgcgcgtgagacagcccctgcacatgtagacaaacaattttatctagatgattcaggcgaatataaatcattttttgatatgactacacatggtaaaactgtcgctgtgccagcaattccaaagctgtttgattatattcacaagcgttatgctaaattgtcattggaagatttaattaatcctgcaattgaactagccattgaaggtcattcagctaattgggctactgaaaaatattcgcgccagcaacacgcgcgattgacaaagtatcacgaaacggcacaagtatttacccatgaaaatcaatattggcgtgaaggtgattggattgtacaacccgaattaggtaagacatttcaaatattaagagaacaagggtttaatgcattttataaaggtgacattgcgaaacaattagtcaatgttgtcaaagcatgtggtgggacaatcactttagaggatctagccaattatgatattcagattaaagcgccaatcagtgcgacatttaaagactatgacatttattcaatgggaccatctagttctggcggtatcacggtaattcaaatattgaagttattagaacatgtcgatttacaatctatgggtccaagatctgttgattacttgcatcatttgatacaggcgatgcatttagcatatagtgatcgcgcgcaatacttggcggatgataattttcatgaggtgcctgtacagtcattaattgatgacgattatttaaaagcacgcagtaagctcattgatagcaataaagcaaatattgatatagagcatggtgttgtgtctgattgcattagtcatacagatgttgaagaaaatcataccgaaacaactcatttttgtgtgattgataaggaaggtaatattgcttcatttacgacatcaatcggtatgatttacggatcgggtatcacgatttcaggctacggcgtgttattgaataccacaatggatggttttgatgttgtgacgggtgggatcaatgaaattgcaccttataaacgaccactaagtaacatggctccaacgattgtgatgcatcacgggaagccaatattaacagtaggtgcacctggtgctataagtatcattgctagtgttgcgcaaacattaatcaatgtattagtgtttggcatggatattcagcaggctatagatgaacctagaatttatagtagccatcctaatcgcattgaatgggagcctcaattttcacaatctacaattttagcattgattgcacgtggacatgcaatggaacataaaccagatgcctatattggagatgtacatgggctacatgttgacttgaatacacgtgacgcatcgggaggtgctgatgatacgagggaaggtacagtgatgggtggtgaggtattatcaattagaaaacaaccattaccatatcgtcaaatgtatggtagtaatgtatatcgtgtatatttcaatgatgtgcagttacctttattggcagatcaagtgcgatggatgcatgacaaatattgggttgatgaaagtgtcgttagaatcatcttctctgaagttagtgcacatattgaagatttaagaagttatgaaaacgcaggagaaaattatatagatattacctggttagcacgaaagaaaggttatcaagtaacattgaaggatgacggtttatacttaactgatgatacatatacttcagtgaaacggaacacaaatgcatactatagatatgatcgagatagtatcacaagatagtttatacgcttgatatgaagtttgtagtggataaggacttttgttgaaagaaaggattcgatttcgaactttagcgtgacgcttgagtgtagtaatgttggaaatgctatacgaaacgctagtcacctttgtaaatatacaacacctcacatattcgtttttgatgtacatcacaatagttagtctaaaatctaacgtgatgtggtttggtacagttgaacgagttatgtgaggtgtttttataatgtgggattttaatagatgatttggatgtttctataattacagcataagtattaatgttcgctactaagtttaagtcaagtccagactcctgtgtaaaatgctatacaatgtttttaccatttctacttatcaaaattgatgtattttcttgaagaataaatccattcatcatgtaggtccataagaacggctccaattaagcgattggctgatgtttgattggggaagatgcgaataatcttttctcttctgcgtacttcttgattcagtcgttcaattagattggtactctttagtcgattgtgggaatttccttgtacggtatattgaaaggcgtcttcgaatccatcatccaatgatgcgcaagcttttgaatattttggttgatcgatataatcatgaatcaatcgatttttagcctcacgcgctaagttaatatctgtgaacttaaaaattcctttaacagcttctctgaaagattttgaattttttttaggaatggtggtaaagatatttcttaggaagtgaacttggcatctttgccaacttacgttggtgaaggattttctaatggcagagactaatcctttgtgcgcatcagaaataacgagttccgtaccttgtaaaccgcgttcttttaggtattcaaaaaatgttgtccaggtctcttcgctttcgccactttgaatcatgaagccgataatttcacggtcgccatctttggttattccaatcgctatatgacagctttttgagagtactcgattttcttctcgtacttttatatagagtacatcggtcattaagtaaggataatttttttctgataataaacgattctgccactcgttaaccataggttctagctgttctgttaagctagaaacgaaggacttagagacggatttaccacaaagttcttccacaatttttgatactttacgagttgaaacgcctgatacatacatttccaacattgaagccatgagggctttttcgtttcgttgataacgttcaaacactgtgggtgaaaaatggccatcacgtgttctgggtacttttaattctagcgtgcctacacgtgtcgtaaagctgcgctcataatagccatttcgttgactttgtcggttttctgttcgttcatattcttttgcttgaatatattctgttcgttgattttccattagttgattaaataccgttgttaaaatatttttagaaacgtcatcctttacagaatattcaataatgctttgaatctcttcgcttttcagtgtaaaatgtacttgggtcatgtaaaagtcctcctgggtatgtttttgtcgttaaaaacattgtaccgtaaaaggactgttatatggcctttttacttttacacaattatacggactttatcaagtttaaccagaagtttttatgtgtcttcatactttcatatctactctcaaaatatatcatcaacactatcatatgttttaaaaatatttacatcataactaaagtgaatgtcaaaatttaaatttgtaaaaacaatagatgtatataaaaagttgaaaaggattgtaagaaaatcaaaaaaaacactgtatgacgtttgattagtcacacagtgtagataacaattaaaatgttgttgccaatttttcagcattattaatactagttgctttaatttcttcagttttatgcggttcggcattgtgtccttcaataatgattgtttcatatgatggcacacctaagaatgtcataattgttcttaaataacggtcacccatttcaaaatcagcagcaggtccttcagtataatatccaccacgtgattgaatgtgtaatacttttttgtcagttagtaaaccttgtggtccttcagcagaatatttaaaagttttacctgcaattgaaatagcatcaatatatgctttaactacaggtgggaaagaaaggttccacataggcgttacaaacacatatttatctgcacttaaaaattcttctaaaatgtcactcaatcttgaaactttcatttgttcatcatcagttaacgtttcgccattactcattttcccccaaccagttaatacatctttgtcaataactggaatataagtttcaaataaatcaatatgtttcacttcatcttcaggatgttgttgttgatatgtttcgataaatgctttaccagccgccatagaatttgataccagttcattaaaagggtgtgctgtaatatataatacttttgccatttgaaaattctcctctgtttctgttattttcttaagtataattattatactaggtataaaatttaatatcaatcaaaatattcaaattaccatcattttcttcatctatattttgcagtactactaaagtatgagtgcatttaattatgaaatagttgatttagaatatatacttaatacccaaaatatatgaaggatggatgccactatgacaaagcgaccaaaacgtattttggcaacaattatcatttttctttcactattatttacgattatttatatagatgacatacaaaaatggtttaaccaatataccgataaattgacacaaaatcataaaggacaaggacactcaaaattggaagacttttttagagggagtcggattactgagacttttggtaaatatcaacattcaccatttgatggtaagcattatggtattgattttgcattgccaaaaggtacaccaattaaagcgccgacgaatggtaaagtaacacgtatctttaataatgaattaggcggcaaggtattacagattgccgaagataatggagaatatcaccagtggtatctacacttagacaaatataatgtcaaagtaggtgatcgagtcaaagcaggtgatattattgcatattcaggcaatacaggtaaacaaacgacaggcgcacatttacattttcaaagaatgaagggtggcgtaggtaatgcatatgcagaagatcctaaaccgtttatcgatcagttacctgatggggaacgtagcctatatgatttgtagttatagaagagtgcccgcagtctaaaaaatcaagcaatcattgtgtgagtataatacttacataatggttgcttttttcaatgaaaatcgaaatgctaagtcatacttgtttgatttagatattatttaaaatgtaagacaaggttgttagcattggcagtgaaatttcgcacgtaaaaaatcattattgacacactaaaaatagttgtgtgctatatcaattttctgtataaaagtttaattctgacagtaatgtaaacgtttacaatttatgattgacattaataataagtgactatatgatttatgtaagtatttgtgcaaacgttttcacaaagtgtattgcacaatcaaactgtaaacaaagtatgggaggcataacatggcagaactaaagttagagcatattaaaaagacgtatgataacaacaatactgtagtgaaagattttaatctacatattactgacaaagaattcattgtatttgttggaccatcgggatgtggtaaatcaacaacattacgaatggttgctggactagagtctatcacatctggagatttttatattgatggggaacgcatgaacgatgttgaaccaaagaatagagatattgcgatggtatttcaaaactatgcattatatccacatatgactgtttttgaaaatatggcatttgggctaaagctacgtaaagtgaataaaaaagagattgaacaaaaagttaatgaagcagctgaaatattaggattaactgagtatcttggtcgtaaaccaaaagcgttatctggtggacagcgtcaacgtgttgctttgggcagagctattgttagggatgcgaaagtctttttaatggatgaaccattatcgaatcttgatgcgaagcttcgagtacaaatgcgcacagaaatattgaaattacataagcgacttaatactacgacaatttatgttacgcatgatcaaactgaagcattgacgatggctagtcgaattgttgttttgaaagatggcgacattatgcaagtcggcacacctagagaaatatatgatgcccctaattgcatttttgtggcgcaatttatcggctcaccagcaatgaatatgttgaatgccacagttgaaatggatggattgaaggtaggaacacaccattttaaattacataataaaaaatttgaaaagttaaaagctgctggctacttagataaggaaattattttaggtattcgagctgaagacattcatgaagaaccaatatttattcaaacctctccagagacacaatttgaatctgaagtagttgtatccgaactgttaggttcagaaattatggtacatagcacattccaaggaatggaattgatttctaaattagattcaagaacacaagtgatggcgaacgacaagattacactagcatttgatatgaataagtgtcacttttttgatgaaaaaacaggaaatcgtatcgtctaagggggagtattcatgtctaaaattttaaaatatatcacgttagccgtggtaatgttattaatcgtaactgcatgtggccctaatcgttcgaaagaagatattgataaagcattgaataaagataattctaaagacaagcctaaccaacttacgatgtgggtggatggcgacaagcaaatggcgttttataaaaaaattacggatcaatatactaaaaaaactggcataaaagtaaagcttgtaaatattggtcaaaatgatcaactagaaaatatttctctagacgctcctgctggaaaaggtccagatatctttttcttagcacatgataatactggaagtgcctatctacaaggcttagctgctgaaatcaaattatcaaaagatgagttgaaaggcttcaataagcaagcacttaaagcgatgaattatgacaataagcaattagcattgccagctatcgttgaaacaaccgcacttttttataataaaaaattagtgaaaaatgcaccgcaaacgttagaagaagttgaagctaatgctgccaaactaactgatagtaaaaagaaacaatacggtatgctatttgatgctaaaaatttctattttaattatccgtttttattcggcaatgatgattatattttcaagaaaaatggcagtgaatatgatattcatcagctaggactaaattcaaaacatgtcgtcaagaatgctgaacgattacaaaaatggtacgacaaagggtatcttcctaaggcagcaacacatgatgtcatgattggtctttttaaagaaggaaaagtaggacaatttgtcactggaccatggaacattaatgaatatcaagaaacgtttggtaaagatttaggagtaacaacattgcctacagatggtggcaaacctatgaaaccatttctcggtgtacgtggttggtatttatctgaatatagtaaacataagtattgggctaaagatttaatgttgtatatcactagtaaagatacattacaaaaatatacagatgaaatgagcgaaattactggacgtgttgacgtaaaatcatctaatccaaatttaaaagtgtttgaaaagcaagcacgtcatgctgaaccgatgcctaatattcctgaaatgcgacaagtttgggaaccgatgggcaatgcaagcatatttatctcaaatggtaagaatcctaaacaagcgttagatgaggcgacgaatgatataacgcaaaatattaagattcttcatccgtcacaaaatgataagaaaggagattagttatgacgaaacgtaaccctaaattagcggcattattatctgttatacctggtttgggacagttttataataaaagacccattaaagggacgatattttttatctttttcatcagttttatttctgtattttatagctttttaaatattggtttttggggattgttcacattagggacagtacctaagttagacgattctcgtgtcttacttgcacaaggtattatttctatcttactcgttgcttttgcaatcatgctatatgtcattaatattttagatgcatatcgtaatgctgaacgatttaatcgcaatgaggaaataaaggatccgaaggcacgtatggttgcaacatgggacaagacgttcccatacttactaatctcaccaggtacattcttattgatatttgtagttgtatttccattaatatttatgtttggagtagcatttacaaactacaatttatacaacgcgcctccgagacacacattagaatgggttggtttagataactttaaaacgttattcacaattggcgtttggcgtaaaacatttttcagtgttattacttggacattagtatggacgcttgttgcaacgacacttcaaattgcattagggctgtttttggcaattattgtaaatcaccctgtcgtcaaaggtaagaaatttatccgcactgtgttaatcctaccttgggctgtaccatcatttgtgacaattttaatatttgtagcgttatttaatgatgaatttggtgcgataaataatgatatattgcaacctttattaggtgttgcaccagcatggttaagtgatccattttggtcaaaagtggcattaattggtattcaagtatggcttggtttcccattcgtctttgcactgttcactggtgtactgtaaagtatttcatcagattggtacgaagcagcagatatggatggtgcgtctagttggcaaaagttcagaaacatcacattcccgcatgtcatttacgccacagcgccattgttaattatgcaatatgcaggtaatttcaataattttaatcttatttatctatttaataaaggtggtccaccagtgtcagggcagaatgctggtagtacagatatcttgatatcttgggtgtataatctgacatttgagtttaacaactttaacatgggtgcagttgtgtcattaattattggatttattgttgctattgtcgcatttattcaattcagacgtacaagtacgtttaaagatgagggaggtttataagatgacaaagaagaaaaacatattaaaagcaatcggtatttacagttttatagcgatgatgtttgtcatcattttatatccactactgtggacatttggcatttcccttaatccaggtacgaacttgtatggtgccaaaatgataccagacaatgcaacatttaaaaattatgcattcttactattcgatgacagtagtcaatacctgacttggtataaaaatacgcttatcgtagcatctgcaaatgcactgtttagtgtgatatttgtcacgttaacagcatatgctttttctagatatcgctttgttggtcgtaaatacgggctgattacatttttgattttacaaatgttccctgtattaatggcaatggtcgcaatctatattttgctaaatacaattggattattagattctttatttggactaacacttgtatatattggtgggtctataccgatgaatgcctttttagtgaaaggttacttcgatacgattccaaaagaacttgatgaatctgccaaaattgatggtgctggccatatgcgtattttcttacaaattatgcttccattagctaagccaattttagcagttgttgctttgttcaattttatggggccatttatggactttatattacctaaaatactattaagaagtcctgaaaaattcacattagcagttggattgttcaactttattaatgataagtatgcaaataatttcacagtgtttgcagcaggggcaattatgattgcagtacctatagcaatcgtattcttgttcttgcaacgctacttagtatcaggtttaacaacaggtgcgacaaaaggttagtttgaaattgggagcggggcagaaatgataaagaaccactaatgaatttattgtgtagtggctcttacaaattagccacagctaatatgtatctaaaaatagcctagaacgttgattgatgtttaaggctcgacatacgtactaatgacgataaagatttaaaggaggacgttatgatgacgattaaagttggaatcattgggtgtggtggtattgcgaatggcaagcacatgccaagtttacaaaaagttgaaaatgttgaaatgatcgcattttgtgacgtagacatttcgaaagcagcgtgtgcggcagaagcatacggtactgacaatgcaaaggtttatgatgattacaaagcattgttaaaagatgacacgattgatgttatccatgtttgtacgccaaatgactcgcattgtgaaattactgtagcagggttgcatgccggtaaacatgtgatgtgtgaaaaaccaatggctaaaacgacagcagaagctcaaaaaatgatagatacagctaaatcaacaggtaaaaaattaacaataggttatcaaaatcgcttcagaccagatagtcaatttttatataaatcagcgcaacgtggcgacttaggtgacatttatttcggaaaggcacatgctattcgtcgtcgagcagtaccaacatggggtgtatttctagacgaagaagctcaaggtggaggaccattaatcgatatcggtacacacgctttagatttaacgttatggatgatggataattatgagccagaatcagtgatgggttcaacattccataaattaaataaacagcatgatgcggcaaacgcttggggttcatggaatccagatgaatttacagttgaagattctgcgtttggctttattaaaatgaagaacggagcgacgatcattttagaatccgcttgggcgattaattctttagaagtggatgaggcaaaatgttcattatcaggaacgaaagcaggtgctgatatgaaggatggtctacgtattcatggtgaagatatgggcacactttataccaaacacgttgaattggaaaacaaaggcgtcgacttttatgaaggtaatgaagtggataaagctgaagaagaagcaaaagcttggattgatgcagttgtaaatgatactgaaccagttgtgaaaccggaacaagcaatggtagttacaaaaattcttgaagcgatttatcagtctgcaaaatcaggcaaagcaatttactttgaataacatcatacggtaaggaggcacatcatgacaaaattaaaagttggtgtgataggtgttggtggtattgcacaagaccgtcatattccagcattgctgaaactcaaagacgcagtctcattagttgcagtacaagatattaatacagtgcagatgattgatgttgcgaagcgctttaatatacctcatgcagttgagacacctagcgagctgtttaaacttgttgatgcggtggtcatttgtacacctaataaattccatgctgatctttctatagaggcattgaaccatggtgtccatgtattgtgtgaaaagccaatggcgatgacgacggaagagtgtgaccgcatgattgaagcggctaataaaaattgcaaattattaactgtcgcatatcattatcgtcacacagatgtggcaattactgctaaaaaagcaattgaatcaggtgtggttggaaaacctttagtagcacgtgtacaagcgatgcgtaggcgtaaagtgcctgggtggggtgtttttaccaataaggcattgcaaggtggcggtagtttaatcgattatggttgccacttgttagacttatctttgtggctactaggtaaagatatggtgccgcatgaagtgctaggaaaaacatataatcaattgagcaaacaaccgaatcaaattaatgattggggaacatttgatcacactaaatttgatgtcgatgatcatgttactagttatatgacatttgccaatcgagcaagcatgcagtttgaatgttcgtggtctgcaaatataaaggaagataaggtacacgttagtttatcaggcgaagatggcggtatcaatttatttccatttgaaatatatgagccccgctttggaactatttttgaaagcaaagctaatgttgagcataacgaagacattgctggtgagagacaggcgcgtaactttgtcaatgcgtgtttagggatagaagagattgtggtaaaaccggaagaagcacgcaatgtaaatgcccttatagaagcgatttatcgtagcgatcttgataacaagagcatacaactttaatgattattatatataatacaaaattctcaatataaaaagaaggagtgcttttcaatgaaaataggtgtattttcagtattattttacgataaaaatttcgaagatatgttagattatgtcgcagaatctggattggatatgattgaagttggaacaggtggtaacccaggagataaattttgtaagttagatgagttgttagaaaatgaagacaagcgacaagcatttatgaagtcaatcacagacagaggcttacaaataagtggtttcagttgtcataacaatccaatttctccagatccgacagaagcgaaagaagcggatgaaacgttacgtaaaacaatccgtttagcaaatctattagacgtgccagttgttaatacattttctggcattgcaggatcagatgataccgctaaaaagcctaattggcctgttacaccttggccaacagcctactctgaaatttatgattatcagtggaatgaaaagttgataccatattggcaagatttagctgagtttgcaaaagagcaagatgtaaaaattgccatagagttgcatgcaggatttttagttcatacaccatatacgatgttgaagttacgtgaggctacaaatgaatacatcggtgctaacttagatcctagtcatttatggtggcaaggtatcgacccaattgctgcgattcgcatattaggccaagcaaatgcaattcatcacttccatgctaaagatacgtatattaatcaagaaaatgtaaatatgtatggtctaactgatatgcaaccatatggtaacgttgcaacaagagcatggacgttccgtacagttggttatggacatagtccatatgtatgggcagatatcataagccaacttattattaatggatatgattatgtattaagtattgaacatgaagatcctattatgtcagtagaagaaggtttccaaaaagcttgtcaaactttgaaatctgttaatatttacgacaagccagcagacatgtggtgggcataatacgaattcgaggttagtctgaagtttgtctgaagtaagactggtggcagtgttgaataaatgcatatatcgccaagccattgccaaaaatttcacaccttaaatcaagttcattgtttgtaaagaaggtgtactttatataagtatatagcgatggtcatacccattcacaataacaatcctcactattgaaaagagtaaataagcttttcaatagtgaggtatatgataataaaaaagcctgttgtcacaatggtcatagacacgacatactttaaaggtttctgaatataatatttcagaacgcactttaaagatggacgtcgatggcgactaatgtgatgacaggctttcatttttaaatattcattaatttctcttcttgtttaatacgtacatataagaaatacgcatacggtactaataaaatagttgtatatgttgcgtgtgttaataataatacaccgattaattcaggaatgatgtttaagaagtaatttgggtgttttgtaattttatataatccagatttaataataggatggttaggtaaaatgaataattttaatgtccaaataccacctaaagttttaataaccataaataacatgatataagcaaagattaatataactaagccaataccatttgcaaagctaaatgtatctttattaataaatgcctctacaccagccaatacataaattaaaacgtgtgttattgctaaaaacttcgaatttttaacgccatattcaactgcaccgtctgcttttaattgttttgagtgattaatagatatctttaagctgacaagtctgatacagaaaaagataagtaatatagatagaatcatgatgtcctccgtcattatgtcatatgtataagcgttgattttgacaacataaagtattttatagataaaacttgtcaaatactattaactatttattaattttagtacataaatatgtttctaagtatgtgtttatgttcagtattttggataatttaataattttaaggatattaagcgcttacaccgacgtgatgtatttgacttaacgaaaatgattgaggtgacagagatgaacttttttgatatccataagattccgaacaaaggcattccattatcggtacaacgtaaattatggcttagaaacttcatgcaagctttcttcgtagtgttctttgtttatatggctatgtatttaattcgaaacaactttaaggcggcacaaccgtttttaaaagaggaaattggattatctacattagaacttggttatatcggattagcatttagtatcacgtacggtttagggaaaacattacttggatattttgtcgatggacgtaacacaaaacgtattatctcattcttacttatcttatctgcgattacagttttaattatgggatttgttttaagttactttggttcagtaatgggattattaattgtactttggggacttaacggggtgttccaatcagttggtggacctgcaagttattcaacgatttcaagatgggcgccaagaacgaaacgtggccgatacttagggttttggaatacatcacataatatcggtggtgccattgcaggtggtgttgcactttggggtgctaatgtattcttccatggaaatgttatagggatgttcattttcccatcggtgattgcattacttattggtatcgcaacattatttatcggaaaagatgatccagaagaattaggatggaatcgtgctgaagaaatttgggaagagccggttgataaagaaaatattgattctcaaggtatgacaaaatgggagatctttaaaaaatatatcctgggaaatcctgttatatggattctatgtgtttcaaacgtctttgtatacattgtacgaatcggtattgataactgggcaccgttatatgtgtcagagcatttacactttagtaaaggcgatgcagttaatacgatattctactttgaaattggtgctttagttgcaagtttattatggggctacgtatcagacttattaaaaggtcgtcgtgcaattgtagctattggctgtatgtttatgattacatttgttgtcttattctacacaaatgctacaagtgtaatgatggttaacatttcattgtttgcattaggtgcgttaatctttggtccgcaattattaattggtgtatcattgactggttttgttcctaaaaatgccatcagtgtagcaaacggaatgacaggttcattcgcgtatctattcggtgactcaatggcaaaagttggtttggcggctattgctgatccaacacgtaacggtttaaacatctttggatatacattaagtggatggacagatgttttcatcgtcttctatgttgcattattcctaggcatgattctattaggaatcgttgctttctatgaagaaaagaaaattagaagtttaaaaatctaatatcaatcggattaaaagtatcgccaatttattgcagtatagttggcaatcctgccccgacggcatgtgcgtgaagagatgaaagatactgcttctacccttgcaaatatatcatctctatgtctcggggcagatcataattccctgttatgaagtatccttatttgcccgacttagggtgactcaatgaatttactccctacaataaagacatatagcggtgtcaatattgtagggagtattgttttatatttagactctctaaaaagcggattgaaagaaaagtgaaaacttctctatcagtccgctttttcatagaacaaaatggatgcgccataatcattagttatttgctaatctattttgcttgcttacaataatcacttggcgacatttgtaaatattttttaaaatgatagctaaacattttatactctgaaaagcctactttgtctgcaatttcatagtgcttataatgtcgatctaacaattgtagagattgtaaaatacgatagcgatttaaataatcgacaattgtaataccaacatgatctttaaatgttcgcatcgcatacgattcactaacatcgatatgttgaattaaatctgaaacagtcactttcgtttgataagattgcttaatttgatcaacaatctgatttacataataatcatcgtattctacttttaataatggttggaaggcatcatgacaaggtgctaagctacggccgttctgtgattgttgctctaataaggtacggacaagtcttcctaaaataacttctaattgtgcatggtctactggttttaataaataatcaagaacatgatgttgaatgccggctttcatatattcaaagtcatcgtaactcgataatatgatgacattacaatctagatgcgcaatatcattgagtaaatcgacgccatttttacgtggcatacgaatatcagtaattactaattctggctgatgttgttgaattagtgataatgcttcaacaccatctttagcagtgtatattgtattgaaatgatagtctccccaaggaatgatttgctttaaaccttctcgaataattcgctcatcatcacaaataactaccttaaacatctacattcccccttgaaagtggtattttataacaaattaacgtaccttgattacgctttgaaaaaatatggagtcgtgcatgtgaaccatattgaatcattgctttattgtgtaaatgatttaatcccaaatgcttagtatcaaatacatcattattaagagattggcgtacatattgcaggcgagatgacgacatcccaataccattgtcgcaaactaaaacatgtaaattctgacgtgccaatgtcaggcgtatagtaatgtccaatgactcagtatctctaccatgtttaatagcattttctatgagtggctgaagcatcattttaccaattgtctggtgacgcgcttcttcagaactttcgatatggagcttaatcatgtcatcaaaacggatgttttgtatcgcaacatactgttcaatgtagttcaactcttcgtttaattccactgtatgtgagtttgtacgtaatgagtaacgtaacatttgcgataattgttggaccacagtttgtgctaatttcggagataacgtaattaaatattgtattgtttgcatcgtattgaataggaaatgaggttggaattggcgttctatttcctttaactgaatatcacgcaagcgacgttctgtatgctcgatagaatggatcagttgctcatttgattcaaataaatcgtaaatataattattaatttcttctagttcactgttgttttttaaaggcgtatatgtacctagatgacgatttttggcatagtaaattttttgaataatcgtttcgatatcttttgtttgtcgtttagccatattatctgcactaatgaaaccaaatattactagtaaaacaagaactacggccataacaattaacaacgtgataccatcttcaatgttttcatgtatatctttataaataatgagacgatggtcagcatggtttaattttacagattcattcataaatccgaattgttgcggtctatacttttcacctatagtaaaacggtcatcgttggcgtataaaatattgtcatattgatcaacgataagtgcgaattgtcggctatctttcttaatttcacttaaacgtggggtgttagctatataaattttaagcatatatgtactatttttgaatttaagctgatgcgttgaaaataaatacatatttttagtgtttaaatgttcataattattggttataaactgatttggtccagataattcataataaagtgttgcgggctgttggtgtattaattttaataattcacgttttgtagcggtaacatcatgatgatttgttaaatcgagctcttgaaacgaattattatgctgtgtaataaacgtctgaatttgcttttcagtatgatgtaaagatgactgactttcatcaacatgttgatgaatcgtacgatgctcaatccaaatatagatggcatagaagcttactagtccaataataatcactaaaaatactggaaaaatagtagacgcaaataacgatcgtctcaattgatgtctataaggtttgtatgccgtcattgaatcatctccaaaaatttatgatgcggaatgtccggtaatttagatttcggtattaaaggtatgttcttaagattttcgatagactgatcgctttgttcactaacatcttttcgaattgacttggcatcgaactctgcaactaatcgttgttgtactgagcggcttgttaaatattgcactaactttttacgcttaggatgagggtgtgcatttttaactaaagcaataccatcaacatttaacattgttccttcaattggataaacgattgatacaggataacctttgtttttccatgtgcgtgcatcttgttcgtagcttagacctgcataatatttaccttttgcaacatcttcaatgactttagacgtctttgacagttgcatcgcgtggtcttggaattgatgcacatcacttactcgatgatgcatgctataaatagcgcgcatatgttgatagcctgtcgttgttgtatttggatttgagtacgcaattttacctttaagtataggttgtaataaatcttgataaccttgaatcttaatatctccttgtaaatctgaattaactactataactgttggcattaatagaaagctagtaacatatttattgttcgagcgataatcctctaattgctgtgttacagatgtatcttgatagggaacaaaatcttctggatgatcaattgtttctgacaacacaccacccataaagacatcaccacgctccgaaagatcttcattatgcaagtttgaaagcagtacttgagtagatccgtgtttaatttcaattttgacatgctcttgtttttcaaaatcatttaaaattggacgaatcaagtttgattgatacggagaataaactgttaatacatttttatctgattcagagtgacgcgtattagtgcatgctgataaaaaaatgagaaataatagcaagatataaatttttgatttcatgatatcccatcaattctatgtatattttaatacaatacttttagcaataaatgacgcataagtaatgttaaatatttagaaatgtttatagatgacttgttaagacgttgcaaatgttgtgatagcacataatttttgtttgtcaagacgacttaccgaagctgtaaagtcaaactgttatattttatttgaagctgttatataaaaattggcaagatattgaacggttcaaaagtaaatttttacgtcaataaaagtatttaatcctgtctcttcatatataaaagtaaatctttctaagtattgatttaacgcttattaacaatcattttttataaacaaatatatactcctaaattaacttttaaagtaatgaaaatagtgaacattataactgttgtgtaacagaatgcaattagcatattactgttacacaaattagtacagtttctatgttttgacatacatttgatgaaaattgtacataatttatgtgaaaaaaatcacaacaaacatgctacaatgactatgaaaacgttaacatagcatttcaaattcacaacattatacagatggaggcgtttagtatgttagaaacaaataaaaatcatgcaacagcttggcaaggatttaaaaatggaagatggaacagacacgtagatgtaagagagtttatccaattaaactacactctttatgaaggtaatgattcatttttagcaggaccaacagaagcaacttctaaactttgggaacaagtaatgcagttatcgaaagaagaacgtgaacgtggcggcatgtgggatatggacacgaaagtagcttcaacaatcacatctcatgatgctggttatttagacaaagatttagaaacaattgtaggtgtacaaactgaaaagccattcaaacgttcaatgcaaccattcggtggtattcgtatggcgaaagcagcttgtgaagcttacggttacgaattagacgaagaaactgaaaaaatctttacagattatcgtaaaacacataaccaaggtgtattcgatgcatattctagagaaatgttgaactgccgtaaagcaggtgtaatcactggtttacctgatgcatacgggcgtggacgtattatcggtgactatcgtcgtgtagctttatatggtgtagatttcttaatggaagaaaaaatgcacgacttcaacacgatgtctacagaaatgtcagaagatgtaattcgtttacgtgaagaattatcagaacaatatcgtgcattaaaagaattaaaagaacttggacaaaaatatggtttcgatttaagccgtccagcagaaaacttcaaagaagcagttcaatggttatatttagcataccttgctgcaattaaagaacaaaacggtgcagcaatgagtttaggtcgtacatcaacattcttagatatctatgctgaacgtgaccttaaagcaggtgttattactgaaagcgaagttcaagaaattattgaccacttcatcatgaaattacgtattgttaaatttgctcgtacacctgattacaatgaattattctctggagacccaacttgggtaactgaatctatcggtggtgtaggtattgacggacgtccacttgttacgaaaaactcattccgtttcttacactcattagataacttaggtccagcaccagaaccaaacttaacagtattatggtcagtacgtttaccagacaacttcaaaacatactgtgcaaaaatgagtattaaaacaagttctatccaatatgaaaatgatgacattatgcgtgaaagttatggcgatgactatggtatcgcatgttgtgtatcagcgatgacaattggtaaacaaatgcaattcttcggtgcacgtgcgaacttagctaaaacattactttacgctatcaatggtggtaaagatgaaaaatctggtgcacaagttggtccaaacttcgaaggtattaacagcgaagtattagaatatgacgaagtattcaagaaatttgatcaaatgatggattggctagcaggtgtttacattaactcattaaatgttattcactacatgcacgataaatacagctatgaacgtattgaaatggcattacatgatacagaaattgtacgtacaatggcaacaggtatcgctggtttatcagtagcagctgactcattatctgcaattaaatatgcacaagttaaaccaattcgtaacgaagaaggtcttgtagtagactttgaaatcgaaggcgacttccctaaatacggtaacaatgacgaccgtgtagatgatatcgcagttgatttagtagaacgctttatgactaaattacgtagtcataaaacatatcgtgattcagaacatacaatgagtgtattaacaattacttcaaacgttgtatacggtaagaaaactggtaacacaccagacggacgtaaagctggcgaaccatttgcaccaggtgcaaacccaatgcatggccgtgaccaaaaaggtgcattatcttcattaagttctgtagctaagattccttacgattgctgtaaagatggtatttcaaatacattcagtatcgtaccaaaatcattaggtaaagaaccagaagatcaaaaccgtaacttaactagtatgttagatggttacgcaatgcaatgtggtcaccacttaaatattaacgtatttaaccgtgaaacattaatagatgcaatggaacatccagaagaatatccacagttaacaatccgtgtatctggttacgctgttaacttcattaaattaacacgtgaacaacaattagatgtaatttctcgtacattccatgaaagtatgtaacaaaatttaaggtgggagcactatgcttaagggacacttacattctgtcgaaagtttaggtactgtcgatggaccgggattaagatatatattattcacacaaggatgcttacttagatgcttgtattgccacaatccagatacttggaaaattagtgagccatcaagagaagtcacagttgatgaaatggtgaatgaaatattaccatacaaaccatactttgatgcatcgggtggcggtgtaacagtcagtggtggcgaaccattgttacaaatgccattcttagaaaaattatttgcagaattaaaagaaaatggtgtgcacacttgcttagacacatcggctggatgtgctaatgatacaaaagcatttcaaaggcattttgaagaattacaaaaacatacagacttgatattattagatataaaacatattgataatgacaaacatattagattgacaggaaagcctaatacacacatccttaacttcgcgcgcaaactgtcagatatgaaacaacctgtatggattcgccatgtccttgtgcctggttattctgatgataaagacgatttaattaaactaggggaatttattaattctcttgataacgtcgaaaagtttgaaattctgccatatcatcagttaggtgttcataagtggaaaacattgggcattgcatatgaattagaagatgtcgaagcgcccgatgatgaagctgttaaagcagcctaccgttatgttaacttcaaagggaaaattcccgttgaattataaatacaattcagaccgaaaagaaagcatatgcaacttcaagagtgaaggggcatatgcttctttttcaattgagtattgattattaacaagacgtagtaaatatatgagacaagtccaacaatggttgaaggaagacgcatttgtaagtagctatgctgataaagaatgtgatgccttgttaaagatggggttccaatatcatcgaatgggttattatttgctacttgcatacgaatatgagtcttttcaaatttttattgaccctgagtaatgaaaaatattaagatgaaacttaatattaaagcaatgcggagcgtgattatgaagagaattagtaaagatatatgggcagtatttaaattactgtatcaaaataaagggcgttttagcattaatgccttactattgcagttaatcatgatttttattagtagtacatacttaattttactatttaatatgatgttaaaagtagctgggcaaagccaacttacgattaacaattggatggaaatcgtaagtcaccctgccagtgtgatacttcttattatattcatattaagtgttgcctttctgatttatgtagagttttcattgttagtttatatggtttatgccggctttgatcgacagattattacatttaaatccatttttaaaaatgcctttgtcaatgtgcgtaaactcataggtgtaccagttattttctttgtcatttatttaatgttaatgatacccattgccaacctaggactaagttcagtattaacaaaaaatatttacatacctaaatttttaacggaagaacttatgaaaacgacgaaaggtataatcatttacggtacctttatgattgctgtatttatattaaattttaaattaatatttaccttaccgttaacgattttaaaccgccaatcgttatttaaaaatatgagactaagttggcaaattacgaagcgaaataagtttcgacttgttatagaaatagttatattggaactcatcattggtgcgattttaacattaattatttcaggagcaacatatcttgctatttgtgtagatgaagaaggagataagtttttagtctcatcaattttatttgttgtattgaaaagctcattgttcttctattatttatttacgaaattatcattaatcagtgtgttagtactgcacttaaaacaagagaatgtattagaccagccgggcttagaatttaaatacccaaaaccgaaacggaagtctaggttctttataatttcaatggtgcttgcagtgacgtgttttatcggttataacatgtacttactttacaataatactatcaatacaaatatctccattattggccatcgtggtttcgaagataaaggcgttgaaaattctattccgtcattgaaagctgctgcaaaagcgaatgtcgaatacgttgagttagatacaattatgacgaaagataaacaatttgttgttagtcatgataacaatttgaaacgtttaacaggtgttaataaaaatatttctgaatctaatttcaaagatgtcgtcggtttgaaaatgcgtcaaaatggacatgaagcaaaacttgtatccttagacgaatttattgaaacggctaaacaatcaaatgtgaaactactagttgagttaaagccacatggtaaagaaccagcagattatacacaacgtgttattgatattttgaaaaagcatggtgttgaacatcaatatcgtgtgatgtcattggattatgatgtgatgactaagttgaaaaaagaagcgccatatctcaagtgtggttatatcattccgttgcagtttggtcattttaaagaaacatctttagatttctttgtcatcgaagatttttcttattcgccaagacttgttaatcaagcacactcggaaaataaagaagtctatacttggaccattaacggcgaagaagatttaacgaaatacttacaaaccaatgttgatggtattatcacagatgacccagcattagctgatcagattaaagaagaaaagaaagacgaaacatacttcgatcgttctataagaatattatttgagtaatataaacaaagacctctaaagttatcaagatgatatcttcagaggtctttttaacgttgccatctatggtataggcaatcgtttcattcgtttataatcatatgacaaggatttataaggaaatttggcgtcacaaacacttacatgatttattggtgaattattaattgttttgtgaatgcaaagggttagaaattgaatcgtaaatactttctaatctatgtttcgctttagtcatttgatccaaatttttagtgcgtatagctgatttagcaatatagtgtgcagctaaaatatcgcgtttttgatacgcatctaaatttaggtgcgataatttatttaagtcagtgtttgctattaattcatgtaattgatctacaagcgcttgatgttgatacgtatgtgatgtagtttcagatttgcttgctaatttaataccagtcgtatcaaggagcgccgctttaataccagcaactaaatatgttttgattttcatttgtgttgtcatgctttgttactcctttgatgtacattaatcaaaaaaattatacactattgtatattgcaaagctaattaactataacaaaaagatagttaatgctttgtttattctagttaatatatagttaatgtcttttaatattttgtttctttaatgtagattgggcaattacattttggaggaattaaaaaattatgaaaaagcaaataatttcgctaggcgcattagcagttgcatctagcttatttacatgggataacaaagcagatgcgatagtaactaaagattatagtaaagaatcaagagtgaatgagaacagtaaatacgatacaccaattccagattggtatctaggtagtattttaaacagattaggggatcaaatatactacgctaaggaattaactaataaatacgaatatggtgagaaagagtataagcaagcgatagataaattgatgactagagttttgggagaagatcattatctattagaaaaaaagaaagcacaatatgaagcatacaaaaaatggtttgaaaaacataaaagtgaaaatccacattctagtttaaaaaagattaaatttgacgattttgatttatatagattaacgaagaaagaatacaatgagttacatcaatcattaaaagaagctgttgatgagtttaatagtgaagtgaaaaatattcaatctaaacaaaaggatttattaccttatgatgaagcaactgaaaatcgagtaacaaatggaatatatgattttgtttgcgagattgacacattatacgcagcatattttaatcatagccaatatggtcataatgctaaagaattaagagcaaagctagatataattcttggtgatgctaaagatcctgttagaattacgaatgaaagaataagaaaagaaatgatggatgatttaaattctattattgatgatttctttatggatacaaacatgaatagaccattaaacataactaaatttaatccgaatattcatgactatactaataagcctgaaaatagagataacttcgataaattagtcaaagaaacaagagaagcagtcgcaaacgctgacgaatcttggaaaacaagaaccgtcaaaaattacggtgaatctgaaacaaaatctcctgttgtaaaagaagagaagaaagttgaagaacctcaattacctaaagttggaaaccagcaagaggataaaattacagttggtacaactgaagaagcaccattaccaattgcgcaaccactagttaaaattccacagggcacaattcaaggtgaaattgtaaaaggtccggaatatctaacgatggaaaataaaacgttacaaggtgaaatcgttcaagatccagatttcccaacaatggaacaaaacagaccatctttaagcgataattatactcaaccgacgacaccgaaccctattttaaaaggtattgaaggaaactcaactaaacttgaaataaaaccacaaggtactgaatcaacgttaaaaggtactcaaggagaatcaagtgatattgaagttaaacctcaagcaactgaaacaacagaagcatcacattatccagcgagacctcaatttaacaaaacacctaagtatgtgaaatatagagatgctggtacaggtatccgtgaatacaacgatggaacatttggatatgaagcgagaccaagattcaacaagccaagcgaaacaaatgcatacaacgtaacgacaaatcaagatggcacagtatcatatggcgctcgcccgacacaaaacaaaccaagcgaaacaaatgcatacaacgtaacaacacatgcaaacggccaagtatcatatggcgcccgcccgacacaaaacaagccaagcgaaacaaacgcatataacgtaacaacacatgcaaacggccaagtatcatacggagctcgtccgacacaaaacaagccaagcgaaacgaacgcatataacgtaacaacacatgcaaacggtcaagtgtcatacggagctcgcccaacacaaaacaagccaagtaaaacaaatgcatacaatgtaacaacacatgcagatggtactgcgacatatggtcctagagtaacaaaataagtttataactctatccatagacatacagtcaatacaaaacattatgtatctttacaacagtaatcatgcattctatgatgcttctaactgaattaaagcatcgaacaatcggaagcatatttctaaattatttattcattatagtcttaaacataacatgacctaatatattactaacctattaaaataaaccacgcacatctatgtgacatacgacaatcacagcaataataattgctttagaaagtcgtaccgaactggaacttacaagtctagttcgaacacacactgatgtgagtggttttctttattttaaacatgaacaatcagataagttactagtagtagcaaatattattaaatcaaagggcttcgattcataaaatttaaaacaatgattaaaattagacgtgtaaatgttaaattctaaaacggaaatacccgctatcctattaaaccactttttggttcaatcactatatttcacacagtttcaataataaaacgaatctgcttcaatccgcttcaacttcagcctacttcattcaataacaaaacgaatccgcttcattcaaaatcaaccattctaacgcacatactcaaatatagcagctgcacccataccgacaccaatacacatcgtaaccatgccgtaacgactatcgggacgtctacccatttcattaagtaaacgcgcggttaacattgcgcctgtagcacctaatggatgacctaaagcaatagcgccaccattcacattcgtacgtgatatatctagacctacttctttaatagatgcaatcgtttgagaagcaaatgcttcgttcaattcgattaaatcaatgtcttcaacagatagattgctgagtgacaatacttcaggaatcgcatatgcaggcccaatacccataattttcgggtcaacgcctactgccttataaccaacgaatcgtgcaataggtgtcacgcctagttctttcactttatctccagacattaaaactacaaatcctgcaccatcagaaagtggggcagatgttcccgcagtcacagtgccgtcagctttaaatactgtacgtaatttggctaatgcctccatcgtggtgtcaggtcgtataaattcatcttggtcaaagatatttgtgtgtacttttggtcctacgtttgtatattcaactgagtttacttgtattggaataatttcatctttgaaccgaccatcacgttgtgcgtcataggcacgctgatgacttctgacagcataagcatcttgatcttcgcgtgatacgtcaaattgggatgctacattttcagcagttaaacccataggatatgacgcacctatatcatcatattgtaaggtaggattgtttgtgggctcgttgccacccattggtacggcactcatcaattcaacgccaccagctacaagtatatctccttgacccgccataatttgattggctgcaatcgcgatggtttgtaatcctgatgagcagtagcgattcactgtttgacccggtacagtgtcagataatcccgtacgcaatgcaatcgttcgtgcaatgttttgtccttgtaatccttctggaaaagccgtaccaacaatgacatcttcaatcatattcttattgaattttccgtcaatacgtttcaatacgccttgtaatactttggctgcgacatcatcaggtctttcgtggaataatgcgccttgctttgctttcgctgcggctgaacgcccataagctacaatgtatgcttcttgcatggttatcatcctctcttaatgactatcttttaattacgtaatggcttaccagtttttaacatatgcgcaattctttcatatgattttttagattttagtaagtcaataaagccaattttctccaacgattgaatgtaacgttgattgataaatgtatttcttggtaaatcaccacccgataaaattgtggcgatatttaaggcgatatgataatcatggtcgctaataaaatgaccgtgtctttgcgcatctaattgtccttggatcaatgctttgaagtcttcgcctaaagcgatatattgatgtctaggattcggaatatagtttgtttctgcttcatatttcgcacgtttgagcgcaacttcgacacgttgtgctgtattgaaaataatcgtatctgtatcacgtaaataaccataacgacgtgcctcaaaggcatttgtagagactttcgcaaatgcgatattcgtcagtacttttgtcatggaagcttgtttgtcatcaaacttatgcgatgtgcgtaatatgcgatcagccatttctgcaaggccacctccactcggtaataagccaacacctgcttcaacaagaccgatataagtttcacttgcagcgacaacaataggtgagtaaagtacaagctcacaaccaccgcctaaggcacgaccttgaacagctgtgactactggtttcaaactatacttcaaacgattaaagctataatgtaatttatcaattgattgtgcaacgacatcatctacaagaccgtcttcatgcgcctttttcattaagaaaaggttagcgcccacactgaaattattaccatctgcataaataaccatacttgtgtaatgttcattttccagtaaatcaatcgcatcaactaacgcatcgttgaattcatcggtaatgacattatttttactttgtaatttcagtaacagttgatcattatgagttacggaaagtttggcatcacctttatcccaaagttcatcttttacgaagtgagaaacaggcgttgcatattcaatggtctcatcttgtttataaaagccaccgtctaaatcactaatccattgtggtaagtctccaagttcgtcttccatacgtgttttaacacgttcatatcccattgcatcccataattggaatggaccaagtttccagttgaacccccagacaagcgcacggtctatgtctcggaaatcatcggtagctttaggtacattgatagcagagtaatagaaattattacgtaatgtctcccataaaaatagtcccgcttcgtcttgcgcattgaatatgacatcaaggttatgcactaagtctttattaaattcatttaaaattggtaattgtggttgcgatacaggtacataatcttgtttttcaacatcgtaaacaagtcgagctttagtttctttatcctttttgtaaaatccttgttttgttttacgtccgagtgcgccattttcatacaacgtatttacaattttgacatcatgaaaataaggtgtttcttcaggtacttgttgcatgcctttaattacagacactgcaatatctaaaccgactaggtcagatagggcatatgtacctgttttaggacgaccaatcgcttgcccagttaaagcatccacatctacaatgcttaacttgtgttgctcggcgcgatacataatatcattcattgtttgcgtgccgactctatttgcgacaaagccaggcacatcattgacaacaatgacacctttacctaacacattttgcgcgaaattttttacatctaatataatagattccttcgtgtgtgacgtaggtattaactccactaatttcataatacgtggtgggttaaagaaatgtagaccaaagaatcgttcttgatccttctcgttaaatgcttgagcaatcgcattaattggaatacctgatgtatttgtagcgaataaagcatcttctttagcatgttgtagaactagttgccaaacagcatgcttaatttcaatatcttctttgactgcttcgatatataaatcagcatcatcatttaccaagtcatcatcaaaattaccatatgttaaatgactcgctagatttaagtcgaatagtagcggtcgtttcttatctgtaattttatcgtaagattttttcgcaatgagatttggatcgtttttgtccactacaatatctaatagttttactttaagtccagcattcacaaagagtgctgccagttgagcgcccattgtgcctgcgccaagaacggttactttattaattgtcatagtgattcctccaatttagttgaggataagataaccattaagataattggaataacgttgctattttataaaattaattaagtatctttgacagtcatcttagcctcttatttaaggaaaaagctttatgcttaaaataagtctttttttagtgaaattactgcatcacatataattctttgctatttatacgaaagcagaatctccagtcaaagcgcgtccaattactaaggcattaatttcatgtgtgccttcgtatgtgtaaatcgcttctgcatcagagaagaaacgtgcaatatcataatcgtcagctagtatgccattaccacctgtaataccacggcccatagctactgtttcacgcaaacgtaaggcattcatcatcttcgcggttgaagttgcaacctcatcatattcaccatgtgcttgcatattagctaattgagcacatgttgccattgcttgagctaaattaccttgcatcattgctagcttttcttgtattaactgatatttactaattggtttgccgaattgcttacgctcagtgacataatctaatgtggcacgtaaagcgccagccataccacctgtagccatataagcaacgcctgctcttgttgaataaagaattttggcaatatctttaaagcttgttatgttttgtaagcgatccgcttcatctactttgacattagttaatttaattagggcgttaggaacaatgcgaagtgcgattttattatcaatgacttcaatatcgacgccatcttgttctggtctgactacaaagcaatggggtttgccagtttctttatttactgcgaatactggaatgacatcagatacatgtgcaccaccaatccatttcttttcaccattgataacccaagtatcgccctggcgttcagcgactgtttcaagacctcccgcaacgtccgaaccgtgttctggttcagttaaagcaaagcatgtacgcagttcatgtgactgtaatttaggtacatatttcgcaatttgttctttgctacctccgaaatagaaagtgttatgccctaaaccttggtgaacaccgagtagggtagctaaggaaatatcaaatcgcgcgagtaggtaagacatgaaaaactgaaatagttgactaggcattttggcgtttggacgatccttgtatagtaatggattgttaaaataatttaattctcccagatctttaaaatagtcctcgggtacagtagcgtctatccaatgttgattaatattttcacggtacttactttctagcaatgaatctacttgttgtaaaaattcgacttcaccgtctgttaaacctttagcaatactaagtacatcttcaggaaataatgtttttaagactgtttctttttcaaatgtcatataaattcctcctaaaaataatatgaatactaatgtgaaatgcatttaattcaaaacaacacgctttatttgtaaacgcttacactaaatgctaaaaattttttatcacctttaaagtgtttgtgagactttgtcattcatcatttgtcgaatcgcaagtttatctggtttctgcgtactgtttaacggcatatgtgtcactggtacatacattcttggaactttataacctgctaaacgacttcgcatatgttgatctaaaatttcagcgtaatgaggttcatcttcacgaagtataatggctgcagcaattgactcaccatattttggatgatcatagccaacgaccacacaccggtctactagtggatgctccgctaaagcattttcgacttcggatggtaagacattttcgccaccagttatgattaattcttttttgcggtcaataataaatatatcgccatcgtcgtccatcttcgctaaatctcctgtcaataagtaacgaccatgaaacgctttagcagtctctgctggtttattccaatatcctggcgtgacatttttagccttaattgcaagttcgccaatctcaccagtaggtacttcttcaccgttatcatcaaggatacgtgcatcaacaaacatgactgctttaccaatactcattggtttacgttttgaattttccggtgtattaacaagtacaagcggtgcttcagttaagccatagccattaataatgtttatgccatattgcttaaaagctgcttggatacttggtaatggttgtgaaccaccttggatgatataatccatagctttaaaattttcaggattaaaattactagcacgtagcgtactataatacattgtcggaatcatgataataaatgtagggtgatattgtgcaatcatgtcattcaattcttcgccgttaaagtaacgttgaagaataagtgttccacctgacattaatactggtaatacagtatcgttaaaccctaaaacatggaacattggtgttgatacaatcgtaatatagtttgaattgaacttgtacgttagctctaagtttgcgccgttatgaacaaatgattcatatgagaacatcacacctttaggtgatccggttgtaccacttgtataaattaatgctgcaagatcttgtggttcaacaggtgttgcttgaaaaggttggtgataatctggatttacgatttcatcatattgcgctacatcaatatccatatgcaataagttttggtcaatatcggtgagtgaacttaaatgtttttcagcatagaagagcagttttaattgtgcatcttccacaatggctgcaatttcttttgggttaagccgccaattcaatggtaaaaaaaccgcacctgttttaaaacaagcaaataataaatctaatattgcaatatcatttggcgcaaaaataccgataacatcgccttttttaacaccttgagatgttaaataatgtgccatattatcagcgcgtgcattgagttgttggtatgtccaagatgtttgttttgcgtgatcaataacggcaggcttgtcatcatcgaagtctgagcgcgtttttatccaatcgaaattcattagtataccccctttagcttcactttcatactttatgaattgattgtttaagttctccccatttttctttgtaaatgctggtatcaattaattttaaatgatcagcaataattggtttaaaagccatttgattcaaaatatctttatgcaaatcaagacctggtgcaatttcaattagtttcaagccttgattggtgagctcgaatactgcacgatcagtaacaaaatagacttcttgctcgagtgattgtgaatattgtgcattaaagtcgatatggctcacatctgatacaaatttctggttttgtccttcagtttcaatgtttaatcgttgattatgacatgagacatgactgccagctacaaaagtacctgaaaagataattttatttacagattgtgtaatgtctataaagccgccacatccatttagtcggtcattgaagtaagacacgttgacattgccgtattgatcaacctcagcaaagctaagataggcaactgatacaccattgttataaataaaatcccatgctcgatcatgaggcatgcgcacatctgcattgtaattcataccaaaatgttcacgactcccaacgaatccaccgaaaatgccaacatctagaatcggttgcacatcatgttcaacacattcttcatgcaataaattagagagttcattattgatgccataaccgatgctaattgtatcgccataagttaaaaactgagcagcacgtcggagaatcaacttgcgactattaaaaggtaatgcgggttcaggtattccatcaatccgttcttctccagacaaggctggtaaataatgactctgaattacttggcggtgattcttttcatcttctgtgacgtatacataatcgacaagatttcctgggataacaacttcattcggctttagttgatagtcgtcaactaaatctttaacttgtacaataactttcccatgattggctttcgcgtttaatgcgacatgataacactcgctcaagtaagattcttgagttaaataaatgttaccttgttgatctgcgtatgttcctctcagtagtgccacatcaacgctagggaatgtgtagtgtaagtatgtttcatcgtcgatagttactaatgaaactaaatcatcagttgttcgtgtatttactttaccgccaccgtatctaggatcaacagctgtgtttaatccgattttagtaataactcccggtaataattgattactctgacgataatgagttgcaatgataccttgtggcaaaaaataagcttcaatgtcattatttttcattgcttgtgccgttttggaagaagccgttaaaatgctcataatgacacgtttaatcatgcgacgttctataaaatcatctaaatccggtgcgacacctaaactatggatatcattcgctaatataaatgttaaatcattgggcgtatgatatgtgtcatgttgcgctaacacagcacgtagaacttcggcgggtaagttggctacagctaatgctggtaaaccaatcacatcatcatctttaatgatatgttgtaagtcgtgccatgtgatttgtttcaagcaagtcacctccatcacatttgataaaatgtagcgtttttacactttgtgtaaacccttacaagaaatataacataacgacgtttaaaatcaattagaaatatctttttattctgataatagacacagcatagacacattttaatagtcgataacaattgtaatatcaagggtttgtaatgaattgaatatcattaaaatacttatataaaaatattgctcggaatataaaaagtaacccatgtttatttaaaaaatgcaaagactaattatcattttgatgcatcagtaaggcgagggtgatcagcgtacaattagtggtgtataatgtaactgataaaatcattggagagttgaaggagatgttaaacatatgagagtcaatgttttacaacatacaccaaatgaaggtgttggatacataggtgagtgggcgaaggaaagagggcacgaagtctatatttatcatccatatatgaatgatggcgtgctacctcttgcggaagaaacggatatgttagtgatacttggtgggccaatgaatccagacgatgagatgccttggattcaatcagagcgccaattaattttagtattgatggcacaaaacaaaccaatttatggtgcttgctttggtgcacaacaaatttcgaaagcattaggttatgcggtgttaaaatcaccagtaaaggaagtaggttgggatgatgtttacttagaatcagaaatcattccgaatataccaagtcgattgaaggcactacattggcatgaagatatgtttcaaataccgcaacaagcagaattattattttcggggaaccatattagaaaccaaggatttatcatcgatcatcatgtgattggattacaatttcattttgagcctggtccagacgatgtcagagaaatagtactaaatgatgcccaatacatcaatcattctattttagagcaatcggcggaggacatattagcctttgaggtgcctaaacagaataggcaggccattttccgaatacttgattttattactcaagcgtaagatgtgagttgtattttaaaatgagtaaaaaaaacgaatgtacacaatcgaacaaagtagttatataaatatatggaaaatccatcaatattaaattaaaatagttttattatgaaaagtgaaagtaggttagtctatggaaggtcttaatcatcaaagaaatacagaaaaagaagagacaacacaaacgcaatcagttgcacctaatacaggtgaagaagggatgtcatcagcaagtacacaatctactaagacatccgacatacataatgaatctatcgataaacaaatggaagccaaagcgcatgaaacagcgcaaaatacagatttaaaaaatgaagcaagaagtttatttgataatgcaaccaaatcaatcggtagactagctggcaatgatgaaagcttaaatcttaatttaaaagatatgttttctgaagtatttaagccacatactaaaaacgaagcagatgaaatatttattgcgggtactgctaaaactacgccagcaatttgtgacatatcagaagaatgggggaagccatggctcttttctcgagtattcatcgctttcacagtaacatttattggattatgggtcatggcagcaatttttaataacactaacgcgattccgggtctcatttttataggggctttaacagtaccattatcgggtttgttctttttttatgaatcaaatgcgtttaaaaatattagcatttttgaagttattatcatgttctttattggcggcgtattttcattactaagtacgatggtattatatagatttgtcgtttttagtgatcaattcgaaaggtttggttctttaacatttttcgatgcatttttagtaggattagttgaagaaactggaaaagcgctcattattgtttatttcgtcaataaattgaaaacaaataagattttgaatggattattaatcggtgctgctattggtgcagggttcgcagtttttgaatcagcaggttatattttgaatttcgctttaggggaaaatgtcccattattagatattgtcttcacacgtgcgtggactgcgattggtggtcatttagtttggtcagcgattgttggtgctgcaatagttattgcgaaagaacagcatggctttgaattcaaagatatatttgataaacgctttttaatattctttttatcagccgttggtttacatggcatttgggatacatctttaactatacttggcagtgatacgttgaaaatatttattttaatcgttattgtgtggatacttgtattcattttaatgggggcaggtttaaaacaagtgaatttactgcagaaagaatttaaagaacaacagaaaaaagtagacgaataataattaaagcttatgttgcacatatgtttgtgacataagctatttttataatttgtctttaaaagagtggaagtggaatactttttggagttaaaaaagtgtttcacgttaaacaaatagtgacaattaggtttatataaaatgaacatgattcgctgaaagtatgtaataatcattttattgaaattcatcaaacagaaagtaatacaatcatataagcaaattaaaccacgccatcatcatctagaatgacttcggcgtggtttttattgaagcggggctgagacataaatcaatgtcccacattcccttatcgttcaatcgtagttcgataatcgattaaatagataccttcaggtgttactttataatttttaaccttagagttagcagcaactatttgatcgttgtaagcaatataactgttaggtacatctcgacttgataatttaataatatcattagaaatattgtgacgttccttaacatctacagtatgattcaattgattaattaaatcatcaacgttgttattattgtagtctcctttattaatagcaccatcttttttatatgcttgattaaagaaatagcctgtatctccacgaggaatcgttccgaaactatacattgttgcatcccatgcagaacggtcttttaagtaaccttctatgtcatcaacacttttaatgtcgatttcaatatttgcttttttagcatctgattgtaatacttgcgcaattttcgatagctctggacgaccgtcatacgtaattaacttaatttttaaagggtgttcttttgtgtaaccatctttagctaataacgtttttgcttgttcgatattttgtttggttaacttaggttctttaatatatggaattttatcattaaatggactcgttgcaggtttcgcgtaaccttgataaatatgatctgcaataccttgtctatcaatgatatgatctaatgcttcacgaacggatttagtcatttttttattagtatgattatacataagtaaagaagttctaaatccagattcttttgacacttttaaattttgattattttctatgtcttgaactttattaactgggacatcagttattaaatcatctttttgagattctaaatttctgacgcgattattgccgtcttcttggtacgtcacagtaatatgatcaagtttcggtttaccttgccaatagtccttaaaattcgacaatgatatttttcgagattgcttataatctttaatttggtaagggcctgtaccaacaggagtttgattaacatctgatttagcatctgtatcataaattgccataaaaggattagctaattcagatacaagttcagggtaagcggaactggttttaattgttagtttttgacctttagcggtaattgatgatattggtaatgaatatttgaccaagtcgctttttttcatgctattttcaaggctagatttcactttttctgcagtcaatttttgaccgttttgaaatttaatattatcttttaattctatatctaacgttgtatcatttggttgatgatacgatttcactaatactttttctatttttccttgatcatttgttttaaataatgattctgcagcaccgatcttaactggtacatctgtttcataaggtgcaatagactttgtttttaacggtaacgaaatatttaagtctttgccagatgaatgcattgagccacatcctgataacactaatactgctgaaaatatagttgctagtcttttaaacttcatttcattaacactctctttctaattactatgtaaaacccaacaattaatattttaaaactttattttgttgaagtaaaatgttgttcaagttcagtaattattaaagttcaattaattgtagtaattacactttttaaaaataaatattagaaatgaagttagcgacatgtatagtgatccacgataaacatatatatctaagtattgagcaactgctgtagtactacagcttggttatgtttagtatcttttgctgaatataacaatagaacatgatgatgttgatttacaattgcctttaatttttcaaaagcttctttttgcgtctcattgtcacgcaattctttttcgtatttttctttaaaagcaccataaagtttaggatcatgttggaaccattgtcgtaactcagtagaaggggcaatgtcttttaaccaataatctaggttagcagttcttttcgaaatacctcttggccagactctatcgactaggatacgaatagcgtctgtattatctttattgtcataaatccgtccaatatctacggtcatcttgtgaactcctttcttatgaaattcagtgagcatacatcaatgcatgttgtggtgggacgacgaaataaattttgcgaaaatattatttctgtcccactcccaattaaaaaacaaccatgacaaagtaaagtcatagctgtttttgtatagatgtcatttatttttacgtttagttaaatacttcaaaccaactgcaaagacggtgtaaccggcaagtgtttgaatcaatgttttgattaaattgttatttttgacaacaatatttgcggtaacaatactcgcgaaatataatgcaaatactttaacgtaacgttgattaagtttcatatgagcactaacctcttttctcagttatactacaacgcttagtcttggaataaatgtttcgtagtgtacgcgatccatatcgtaatttaaagatttaagtgcttcgatcatagattgtaagaattttgtaccaccacagatataaatttcaggtttatttgctaaaaatgcttttaattcttcagcaccgatataaccttgttcgccttttaagtgggtatataatttagcgttgtcataatgatttgcaatactgttgaagttgtctttgaaaggtaaatgttgttcattttcagcaacttgaaccatctgagtatctaaacctttggcagaggcagcttcatacattgctactaaaggtgtgacgccaatacctgaacctaagaaaagttgtggttcagtcgtattctctaatacgaatccacctacaggtgcagctaaattaatcatatcgccttctttaatctcatcgtgtaaaattgttgaaacttcgccttcatgttctgttgtgacatcacgtttaacgccaaaggttaaatgatttttatcacctgatacgatagaatagtgacgtttagctctatatggaagtttatcactagaaacatcaactgtgatgtattggcctggtacatattgactaaagtcatatgcatcagtttcaactgtaaatgatttaatgtcttcagattcttgtttaatattggtaattttgaatggtttaaaaccaatccacatcatttgatcataaatttctttttcaatttggatgaacacatccgcaataacgccatatgctttcgcccaagcttgaatgacagggtcattttcttctaatcctgtcacgtcttgaatggcttttaataaattttcccccacaattggataatgttcagcataaacttgtagtgcgcagtgtttatatgcaactggcataataactggtttaataacacttaaattatcgatattaaccgctgcggccattacagcttgtgctaatgctgaagattgcatgcctcttttttggttcgtttgattaaacatatttaaaagttcaggatgtgccttaaacatttttggataaaagattgacgtaatttctgttcctttttctttaagcaatggcaccgtttgtttgataatgtctttctcttgttctgtaagcatgatactcctcctttaatctgtctattttgattattctactaaaaattccgatattcaattaattggtttgagaaaatataaataaaatggcaaatttgataattgtatgacatttttaattttttaaatacttatcaataagcattgtgtacaattgtctgtttgtacaccgacgattgcgcgcatttatttgactaattcaaaaaacattgttgttttcttagaaaaaagtaaacatgataataaaaatgtgaaagtgtaaataatcactggcgaagtacgaagactaaagacatctaagatgtaatcgtatacaaattaaaaaggtgtaaaaattaaaataaaatgtgaaataaatcacaatttaatattgacccagtacttaatgcatgttacattttatatgtgaaataaatcacaaacttaaaagcggatgacacatgaccttttaagttatgcgttgaaaataaaagagatgtttatttgcttttgtatcgtcaataagcagcattaaactaacatatttgaaactacacgtatgttagtgaattaatcataagggagtttttgtaatgaacaaatttaaagggaacaaagttgtattaataggtaatggtgcagtaggttcaagctacgcattttcattagtgaaccaaagcattgttgatgaattagtcatcattgatttagacactgaaaaagttcgaggagatgttatggatttaaaacatgccacaccatattctccaacaacagttcgtgtgaaagctggcgaatacagtgattgtcatgatgcggatctagttgtcatctgtgctggtgctgcacaaaaacctggagaaacacgtttagatttagtatctaaaaacttgaaaatattcaaatcaattgttggtgaagtaatggcatcaaaatttgatggtattttcttggtagctacaaatcctgttgatattttagcgtatgcaacatggaaattctctggtttacctaaagaacgtgttataggttctggtacaattttagactctgcacgctttagattattgttaagcgaagcgttcgatgttgcgccacgtagcgtcgatgctcaaattattggtgaacatggtgacactgaattaccagtatggtcacacgctaatattgcgggtcaacctttgaagacattacttgaacaacgtcctgagggcaaagcgcaaattgaacaaatttttgttcaaacacgtgatgcagcatatgacattattcaagctaaaggtgccacttattatggtgttgcaatgggattagctagaattactgaagcgattttcagaaatgaagatgctgtattgactgtatcagcattattagaaggcgaatatgatgaagaagatgtttatattggtgttccagcagtcatcaatagaaacggtattcgcaacgtcgtagaaatcccattaaacgacgaagaacaaagcaagttcgcacattcagctaaaacattaaaagatattatggctgaagcagaagaacttaaataactttttataaaatctataccattccaaaaattgtaaaaccttaccccaaaaaattgtataaagggctatttgatacaactatacgtgtcgagtagccctatttttaatgtagtgaaagtcgttgttgaaattaaatttaaatctggcacttaagctttaatcatagcattaagatgattgtctagcagaggcgatttgcggactcactacagtgcatgatgaacttaatgtttcaaatgcaacattaaaaataaaagcagcgatgtcacttcttactccgtacatcgttgccattagttctgttgatatttcggttagtcttaatccccgagcaattcttcaatttcatttttgataactgtaacgtgaggaccgtaaattacttgcacaccagtgccttgctggattacacctttggcaccagtactttcgagtagtactttatcgactttgtcattttgatgaagtgtaacgcgtagtctcgttgcacaacagtcaacgatttcaatgttatccttgcctcccaaaccagcaacaatagtttgtgctctttcagtagcctcaacttgttgtgctgcagctttatcttcacgaccaggtgttttgaaattaaatttcgtaattaagaatctgaaaacgatgtaatacaaacagaaccacacaattccaataggtatgacatataggtagtttgttttactattaccttgtagcacaccaaaaagtaagaaatcgataaagcctccactgaaggtttgaccaattgtaatgttgaaaatgtctgccatcataaatgctaatccatcaaagaaggcatggattacataaagaataggtgcgacaaacaagaaactaaactctaaaggttcggtaatacctgttaaaaatgaagtgagtgcagcggataacattaaaccgccgacaacttttttatgttcaggtttagccgtgtgataaattgcaagtgcggcaccacataagccgaacatcatcgtaataaaacggcctgacataaagcgtgacacacctgaataatacttcgtcacatctggatcaccaagttgagcaaagaagatgttctgcgtaccttgaactaagtgacctttgacttctaaagtaccaccaagtgccgtctgccaaaatggtaagtaaaaaatatgatgtaaaccgagtggacctaacaatcttaagatgaagccataaacaaaagtaccgatggcacctgttttcgttacaaatccacccacatgataaatgccggcttgtatgcttggccaaatgaaaaacatcaatacacctaaaaagattgcggcaaatgctgtgacaatagggacaaatctagagccaccaaagaaacctaaatacggtggtaataccactttgtgatatttgttgtgaagtattgcggtcataatacctgtgataatcccgccaaaaacaccggtttcaaccgtttgtataccgagcaccatgccttgtccattttgtgcaagctgatcttttgccaatgtgcccgtgatagttaataagccattcatagttgcgttcataattaagaaaccgagcagtgcagctaaacctgcagtacctttatcgcttctagataatccgattgcgacaccaattgcaaagatgactggtaaattttggaaaacaatactacctgcagctgacattaatgtaaaaatattttgtaataaggtaatatctaaaatagggtatgctttaacggtgtttggattacttaatgcaccaccgatacccaacaatagacctgcagctggtaagattgcgataggtagcataaaggacttgccgaactgctgtgctttttcaaataaagatttcatcaacatccctcctaattattctcaatatagcttttgagaaatttaatatcaatatatattctgtgtatgaaaatatttttcataaaaattgtttgaatcatgtaacaatcatataaattgctgtttatattgtggtgaaaatgagttgacaaaagtcggtatagttctgtagacatcctattttttagcgaggtggggtgacaaggcatatcggataaatttataagccataaaatagataaatagtgtttgtatccaaaactatgtgaaagttaaaactatttttcaaaataaacatgattcaccacataaataaatatacataagctatcgataacaacttaagaaaggtggatatatataatgaaaagaaagattattatggattgtgatccaggacacgatgatgcaatagcattaattttagcgggggcaattgacagtccactagagatattagctgtaaccacagtcgcaggtaatcaatcagttgacaagaacacgacaaacgccttgaacgtattagatattatgggacgccaagatatagtagtagcgaaaggtgcggataggccgttaattaaaccagttgcctttgcttctgaaatacatggggaatctggattagatggtccgaaactaccgtcgacaccatcacgtcaagcagttgcaatgccagcatcagatgtgattattaacaaagtgatgacgagtgatacacctgtaacaattgtagcgacaggtcctcttacgaatgtagcaacggcattgattcgtgagccaagaatcgctgagcatattgaatctattactttgatgggtggtggtacatttggaaattggacgcctacagcagaattcaatatttgggtagatgctgaagcagcgaagcgtgtttttgaaagtgggattactataaatgtgtttggtttagatgtaacacatcaagttttagccgatgaacacgtgattgaacgctttgaaagtatcaataatcctgttgcacagttcgtcgtagaattattgcaattctttaagaagacatacaagactcactttaatatggacggtggtccaatacatgatgcttgtacaattttgtatttgttacaaccagaattgtttacaatggtacccgttaatatcgacattgaacatcaaagtccactaacttatggcactatggctgtagatttaaatcatgttacaggtaagcctgccaatgcctattttgctacagcagttgatgttgaagaagtgtggaacttgatagatcataagttacgtacatacgaataataatacttaattaaatagatacagttaaccctaaggtgcctgatttaagcgtccttagggtttttgtattggattacaatggtcatggcaatttgataatgattgagatatgtatgttaaaaatgcttcaaaaaacacaaaatacaaaaatatatgcaaaaatttcaattgctttattttaaaagattaaaatcacaaaaaataccgatataattggaatgttgtcgaaacatcacaatgatgtacatactcattttgaaaatatgtgttcaacgagtgtacatcggtgtgacgattgatgataaattgagctcagatgctcaaaggaggatcgaacatgaacggggataatcagcaaatactcagagaaattgtattgaatcctactattcatggtaaagaacttgaatcgatatttggtttgtctcgtagacaactaggatatcgcattcaaaaaatcaatttgtggcttgaacaagagggttatccaaaacttgaaagaacaagccaaggaaattttattgtaagttctgaaatcatgacgttattcaaacgagatgtatcggagcagcaaatgttaaacggcaacaatgtcatttttaacatagaaacacgtcgttattatttaatgctcatgctttttagtaaggaaaacgcaatgtctctaaaccatttttcaattgatttacaagtcagtaaaaatactgtcattcacgatataaatcatgtgaaagagcaattggaagatcatggtttgtcacttaagtattctcgaaaacatggttatgaaattgttggtgatgaatttgaagttcgccgtttcttcattaagttgattgatcaaaggttaaatcatgatattactaaaagtgaagttttaaaggcgctcaacttaacattcgaagatatcgcatatcaaaaagacaagatcaaacaggtagaacaatttttgaagagtcgctttatagacaaatcactgagttcattgccttacgtcctttgtgtgattcgtagacgaattcaaagtggtcatgtgattaatccattaaatattaattatcagtatttgagggatacgaaagaatatcaagcaacggagattatgacgcaacatgagccggatttgccagaagcggaaaagttatatttgacgctacacttactttcaacaagtgtgcaatggactgatttgcaggaatcagataacatatcgaatttaacgatggccattgatcaaatgattcaccattttgaacaaattacttttattaacattgaagataaggagaaattatcacagcaactcttgttacatttaacgcctgctttttataggattaaatataacttaacggatcgtgatgaattaataaatcctttacaaggaaattatcaatccttatttcatatggtgaaacaatcatgtcaatcgttaactgaatatttcggaaaatcattgcctgataatgaaatagcatatttaaccatgttgtttggaggtagtttgagacgtcaagatgaaaacttcgatggcaagataaaagctattatcgtgtgtacacaaggtacgtcagtatcacaaatgatgttatacgagttgcgaaacttatttccagaaattattttcttagatgcgatttcacttagaacatttgaaaattacacattagattatgacatcgtcttttcaccaatgtttgtcttaacacataaaaaattatttatcacaaaagtagctttatctgaaaatgagcaacgaaagttacgtaaagaagtgatgaagtacattaataaggaatcggctgacattgataaggaaataaacaagttaatggcattaattgaacgcactacgacagttaatgacattacagaactacgtgatggtttagaagattttattgcgaattataattcaatttcaaccattaatggatcgattgtcacacaaaataagacattagatttagctgacttgataccagcaaggtacgtgaaaagaatacatcatgttgaaaatattgatgaagctattgctaaagcaagtgatgtgttagttgctaatcattttattgatattaaatatattcatgagatgcaacaggcatttgatgattcgtatatggttatcatgcaaaatattgctattccacatgcatactctgaaaagcatgtacataaaacagcgatgagtatgttgatattacaagaaccaatatacatgtcagatggcacagcaatccatattattgtacctattgctgctgttgataaagtgacacacttaagagcgttactacaattgagagatgtggcgcaaaacaatgacgcaattaagcgcatcatacaaagtcgcaaaaattctgatgtaaatgagattttaaaaaattattcaaataaagaagcgagggaaaatggatgggacagcaattagtgcataaagaaaatataatgctcaatttgtcggcaactgataaagaatctgtattgtcacaaatgtcagatgtgttatttcaaaatgggttcgtaaagtcaacgtttaaagatgcagtcatcgacagagaaaaagagtttgctactggtttaccaacgcatctatgttcggttgctataccgcatacagatgtcgaacatattaaccatagaacgataggtgtggctgttctagaaaaagaagtgccgtttattgaaatgggaacacttgatcaacagacagaagtgaaaatcgtttttatgttagcaatggataaagtagatgatcaacttaagctgttacaacagttgatgcaaatttttcaaagtgaagaaaaattggagcagattctacgaacgaaagatgaaacaattttagcaacactaatcaatgattatttgaaatataactaaaaattaattggaggaattgaaaatgaaacaagtattagtagcgtgtggtgcaggtattgcaacgtcaacagtagtaaataatgcaattgaggaaatggcaaaggaacacaatattaaagtagatattaaacaaatcaaaattacagaagttggaccttatgaagacactgcagatttattagttacaactgcaatgacaaagaaagaatataaattcccagttatcaacgcacgtaatttcttaactggtattggtattgaagaaacaaaacaacaaatcttaacagagttacaaaaataactgaattgatatgtaacgtgggtcaataacatataaatatatgcaaattgcatataaatgactatcacgacaaatgattgtagatgacatagaaacgcagtgactgtaattcaaagggattgcagtcgaatgtagcaagggttgtcgttgaaatgactgtaacgtcaaatgtaatcacaatcggaaagtatcgtgacaatgcatatataacagggagggtttaaatatgagttacttcactgattttgtaaggggatttttagatttaggtgcaactgttattttaccggttgtcatattcttgcttggcctattctttaggcagaaaattggagcggcatttaggtctggtttaacaataggtgtggcttttgtagggattttcttagtcatcgatttattagttaaaaatttagggccagcagcacaagcgatggttaaaaatttaggcgtcagtctgaatgtgattgatgttggttggccagcaacatcatctatcgcgtgggcatcatctgtcgcagcatttattattccactcggaatcattgttaacgttgtattgctagtaactaaagtgacaaagacgatgaatgtagatatttggaatttttggcattatacgtttacagcagcaatggtttatgccgtatcaggcagtatttggcaagcgttattagcagcagttattttccaagttatctgtttgaaagtagcagattggacagcaccgatgatgagtgagttctttgatttaccaggtgtatcgattgctacaggaagtacaatttcttatgcaccaggtatttacttagttaaattgttacaaagagtacccggtctgaataagttagatgctgatcctgaaacaattcaaaaacgttttggcgcatttggagagtctatctttgtcggattaattttaggtttaggtattggtgtgttagcaggttacaaacctggagacatcattaatttaggaatgtcaatggctgcagtaatggtattaatgcctagaatggtaaaaatcttaatggaaggtttaatgccagtttcagagtctgcaagaacatggctaaataaacgttttggcgaacgtgaaatttatattggattgaatgcggctgtagcattaggtcatccagcggttatttcgacagcattaattttagtacctatcactgttttattagccgttattttaccaggaaaccaagtattaccttttggtgacttagcaactataccatttgttgtcgcgtttattgttggtgcagcaagaggaaacattattcattctgtcattgtgggtacgattatgattgcaatttcactatatattgcaacagacgtagcacctattttcacagatatggcgaaaggtacgaatgtacaaatgccaaaaggttcatctgaaatttcaagtattgatcaaggtggtaatatcgttaactatcttatctttaaactatttagtctattcaattaaaaatcgaggtgtttgtggtgaaagctttagtaaaaacaagagaaggacatggcaacttagaacttcttgataaagaagttgcaacaccgctagatgataaagtaaagattaaagtacattatgcaggaatttgtggcacagatattcatacttatgaaggtcattataaagttaattttccagtgacattaggtcatgaattttctggtgaaatcgttgaagttggagcagacgttaaagattttaaagttggtgaccgtgtcacttctgaaacgacattctatgtttgtaatgagtgtgaatactgtgaatcaaaagactataatttatgcaaccatcgaaaaggtattggaacacaagttgatggcgcatttactaattatgtcattgcacgtgaagaaagtttgcatcatattccagacgaagtgtcgtatcagtctgcagctatgacagaaccattagcatgtgcacatcatggcgtttctaagattcaagtcaattcaggcgatgtagcagttgtaatgggatctgggccaatcggattacttgtagcacaagtgttgaaaagtaaaggcgcaactgttgtggtaactggattggacaatgacaaagtcagattagataaagcagaagcattgcacatggattatgtagtcaatttacaacaaacagacttaaaaacgtatatcaatggaattacagacggatacggtgcagatgttgttgttgaatgttcaggtgcagttccagcagcacgacaaggtttggatattttacgcaaaaaaggtttctacagtcaaataggtatttttaaggatgctgaaattacatttgatatggaaaaagtgattcaaaaagaaataacagttgttggtagtagaagtcaaaagccggcagattgggaaccttcattgcaacttatggcggatggtttagtaaatgctgaagctttggtgacaaaaatatatgatatttcgaaatgggacgaggcgtatcaacatttaaaatctggcgaaggtattaaagcattacttaagccgctcgatttagatgaaaatgaaggagagaattaatatggtagaatcaatgctaacttttatgcttgggccattgagacaaatcactgatttttatatggaacatctacttgtaagtaattctatcgtcattgcaggttattttgcgacaggtatttttaaaaagaaaaaagttgtgaattaaatcaaagttgaggtgatttacaagtgaaagctttgaaattatatggcgtggaagatttacggtatgaggataatgaaaagccagtcattgaaagtgcgaatgacgttattgttaaagtacgagcgactggaatatgtggttcagacacgtcacgatacaaaaaaatggggccatacattcaaggtatgccatttggtcatgaattttcaggtgttgtagatgccattggaagtgatgttacgcatgttaatgtaggcgacaaagtgacaggttgcccagccataccttgttatcaatgcgagtattgtttaaaaggtgaatatgcacgatgtgaaaagttgttcgtcattggctcatatgaacctggatcgttcgcggaatatgtcaaattgccagcgcaaaatgttttaaaggtaccagacaatgttgattacattgaagcagcaatggttgagccatcagccgttgttgcgcatgggttttataaatcgaatatacaacctggtatgactgttgcagtaatggggtgtggcagtataggattgttagctattcaatgggcacgaatatttggtgctgcgcatatcatcgctatagatatagatgcgcataaactagatattgctacatcattgggcgcacatcaaaccatcaattcaaaagaagaaaatcttgagaaattcatcgaaaatcattacgccaatcaaatcgatatagctatagaatcatcaggtgctaaagttacgattggtcaaatattgacgctacctaaaaaaggtggcgaggtggtattactcggaataccatatgatgatattgagattgatcgcgttcattttgaaaaaattctgcgtaacgagttgacagtatgtggctcttggaactgtttgtccagtaattttccggggaaagagtggacggcaaccttacattatatgaagacgaaagatattaatgtaaagcctattatttctcattttttaccgttagaaaaaggcccggagacatttgataaattagttaacaagaaagaacgatttgataaagtcatgtttacgatttattagtatgcacctttgaggacgaaaacgctggtatagttatagctatgaaagtgcgaatgccgtctggtctacagatactatcgaaataattcatcttcgaatatacgttgctaaatagccggtttacttgtgtgaaatatgcttgtgaatcggttgttttgcattttgtatacttaaaatgagatggcaatatttgataatttttaaagtgaaaatcaagtacagccacttaataagataaatttattataatatatggtaaaatgatggcagtaataatgaatttgaaaaagagtaaacattaatacctttaacaatttaatatcgtcagtgttaatgattaactgcatggcaaaacaacttagaatggtcagttacaaaaatacatttttataaaaaattatcacactattgtgacaactgcctttggcttaataaaagaggaaagtgagcaataggttgggcttatgtgcgggcataggtcagtaatgtataaatggaaatgatgtaatgacagaatggaggacaacatgatttatgcaggtattttagcaggaggtattggttcgagaatgggaaacgtgccattaccaaaacaatttttagatattgataataaaccgattttaattcatacaattgagaagttcattttagtgagtgaatttaatgagattattatcgcaacgccagcacagtggatttcgcatacgcaagatattttaaaaaaatataacattacagatcaacgtgtcaaagtagttgcaggtggtacggatcgaaacgaaacaattatgaacattatcgaccatattcgcaatacgcagggtatcaacgatgatgatgtgattgtaactcatgatgccgtaagaccatttttaactcaacgtattattaaagagaacattgaagtagcagcaaaatatggtgcagtagatacagtcattgaagcaattgatacgattgtaatgtctaaagataaacagaacatacacagtatccctgtaaggaatgaaatgtatcaaggccaaacaccacaatcatttaatattaaattattacaagatagttatcgcgccttaagtagtgcacaaaaagaaatcttatcagatgcatgtaaaatcattgtcgaatctggacatgcagttaaattggtacgcggagaactatacaacattaaagtgacaacaccgtatgatttaaaagtagcaaatgccattattcaaggtgatattgccgatgattaatcaagtatatcaactcgttgcaccgagacagttcgacgtcacatataataatgttgatatttatggtaatcatgtcatcgtaagacctttatacttgtctatttgtgcagctgatcaaaggtattacacaggtcgaagagatgaaaatgtactgcgcaaaaaattaccaatgtcattagttcatgaagctgttggtgaagttgtattcgatagtaaaggcgtatttgaaaaaggtacgaaagtagtaatggtgccgaatacacctacagaaaaacacgacgtgattgcggagaattacttagcctctagttattttagatctagtggttatgatggttttatgcaagactacgttgtgatggcacatgatcgtatcgttccgctgcctaatgacattgatttgagtacgatttcatacacagagttagtgtcagtaagttatcatgctatacaacgatttgaacgtaaatctatacctttgaaaaccagctttggtatttggggtgatggtaacttaggttatattactgctattttgctgcgtaagttgtacccagaagctaaaatttatgtatttggtaagacagactataaattaagtcatttttcatttgtagatgacatctttacagtaaatcaaataccagatgatcttaaaattgatcatgcatttgaatgtgttggaggtaaaggaagtcaagttgcacttcaacaaatagttgaacatatttcaccagaaggcagtattgctttgttaggcgtaagtgaattacccgtggaagtgaatacacgattagtacttgaaaaaggattaacgttgattggtagtagtcgaagcggctctaaagattttgagcaagttgttgatttatatcgtaagtacccagacattgttgaaaagttagccttattaaaaggacatgaaattaatgtatgtacgatgcaagatatcgtccaagcgtttgaaatggatttatcgacatcttggggaaaaacagtattgaaatggacgatttaataaaccgatgggggaataacaatgacaaaaacgaaacaagcaatacatattgataacatatactgggaacgtgttcagttatatattgaaggacatagtgaaggtgtagatttaacatcaggacaatttgttctgaggaatttaaccgaaacaaaaacattagaagcaaatgaaatgaaaatagacggtaatacatttctatgtagattcaatgtcgcaatattagacgatgggtattatttaccaatggataaatatttatttgtttatcatgaccagttagagtatattggacaacttaatccaaatattattgatcaagcttatgcggcattaaatgaagagcaaattgaagaatacaatgagctgactacacaaaatggaaaagcaaactatgtgttagccaacgaagctaaagttttccgcaaaggtggcgtatcacaacatacggtttataccattactccagaaatagcaagtgacgttaacgaatttgtatttgatattgacatcaccttacctcaagagaaatcaggggtcattgcgacaagcgcacactggcttcataaacaaggccataaagcttcatttgaaagtagaagtttcttatttaaagctatttttaatattacaaagttactacatattaaaagaagcaaaacaatattattcacatcagattcacgtccgaatttatcaggtaactttaaatatgtatatgatgagttactacgccaaaaagtagattttgattatgatattaaaacggtatttaaggcgaatattacggatagacgtaaatggagagacaagtttagattgccatatttacttggtaaggctgattatatttttgtcgatgatttccatccattaatttatacggttcgctttagaccatcacaagaaattattcaagtgtggcatgccgttggtgcttttaaaacagttggctttagtcgtacaggtaaaaaaggtggtccgtttattgattcattaaatcatcgtagctatacaaaagcttatgtatcatcagaaaccgatattccattttatgctgaagcatttggaattagagaagaaaatgttgtaccaacaggtgtaccacgtactgatgtactatttgatgaagcttatgcaacacaaattaaacaagagatggaaaatgaattaccacttataaaaggtaagaaagttattctattcgcaccgacatttagaggtaatggtcacggtacggcacattatccattttttaaaattgattttgaacgtttagcaagatattgcgagaagcataatgcagttgtgttattcaaaatgcatccgttcgtaaaaaatagactcaatatttcacgtgaacatagacaatactttatcgatgtgtcagattatcgtgaagttaacgatattctcttttttacagacttgttgattagtgattattcatctttaatatatgaatatgcagtatttaaaaaaccaatgattttctatgcatttgacttagaatattatattacgacgcgtgatttctatgaaccatatgaatcatttgttccaggtaaaattgtacaatcctttgatgcattaatggatgctttggacaatgaagattatgaggttgaaaaagttgtaccattcttagataaacattttaaatatcaagatggtcactcaagtgaacgtttagtcaaagatttgtttagacgctaatgttggcatatattacttgccatgcaaatgatcataaggcatagttttcaagaagggttatgacaatgaagtgagcaacatgtcatgatgagaagcaggactatacaatgagaataaccttttgatttttcatgcataagaggctgggacataaatccctaaaaaaacagcagtaagataattttcaattagaaaatatcttactgctgttctctatttatacaatacttcgtattgaatggcttcgctttgcccgtctggcacattactgtaaaattctataaatagaatttttgatgacgggtcccttcctagggtgccgtctcagccaccccaaccggcacattgttgtaagctgactatatgtcagcttctgtgttggggcccctgtcttcgactggcactgctccctcaggagtctcgccattaatactacgtattaacatgtaattttacttttaaatactttgaaaaaataagacactttgcccaacttgcacataaatgtaaaattcaataaaatgaattttctgtgttagggcccacaccccaacttgcattgtctgtagaaattggaaatccaatttctctttgttggggcccctgactagaattgaaaaaagcttgttacaagtgcattttcgttcagtcaactactgccaatataacttcgtagagcatagaacattgatttatgtcccagcctgttccaactgaattgtcattttgtaaaataaaataatcaatccaatcgttatctaattcataaatgtgaaaacacatacgttatgaatggataacgattttttgttatgttaaagtggtacattaatcatgtatttcgtatgataattaacgacaagtgtaatggttaaatgtattttatgctgaaatgctataataggcatggttacaatgagcttgctcatacatattaatataattacaaaaacacgtcggaggtacgacatgattaaaactacaattaaaaaattgatagaacacagtatatatacgacttttaaattactatcaaaattgccaaacaagaatctaatttattttgaaagctttcatggtaaacaatacagcgacaatcccaaagcattatatgaatacttaactgaacatagcgatgcccaattaatatggggtgtaaaaaaaggatatgaacacatattccaacagcacaatgtaccatatgttacaaagttttcaatgaaatggtttttagcgatgccaagagcgaaagcgtggatgattaacacacgtacaccagattggttatacaaatcaccgcgaacgacgtacttacaaacatggcatggcacgccattgaaaaagattggtttggatattagtaatgttaaaatgctaggaacaaatactcaaaattaccaagatggctttaaaaaagaaagccaacgttgggattatctagtgtcacctaatccatattctacatcgatatttcaacatgcatttcatgttagtcgagataagattttggaaacaggttatccaagaaatgataaattatcacataagcgcaatgatactgaatatattaacggtattaagacaagattaaatattccattagataaaaaagtgattatgtatgcgccaacttggcgtgacgatgaagcgattcgagaaggttcatatcaatttaatgttaactttgatatagaagctttgcgtcaagcgctggatgatgattatgtcattttattacgcatgcattatttagttgtgacacgtattgatgaacatgatgattttgtgaaagacgtttcagattatgaagacatttcggatttatacttaatcagcgatgcgttagttaccgactactcatctgtcatgttcgacttcggtgtattaaagcgtccgcaaattttctatgcgtatgacttagataaatatggcgatgagcttagaggtttttacatggattataaaaaagagttgccaggtccaattgttcaaaatcaaacagcactcattgatgcattaaaacaaatcgatgagactgcaaatgagtatattgaagcacgaacggtattttatcaaaaattctgttcattagaagatggacacgcgtcacaacgaatttgccaaacgatttttaagtgataacttaaaaacaataaaaaattataaattaattagttaagtgatataaataataaacgaaatgtttgcttgtatgttattatttgtgtatgaaaacgtctgatataatgtaatatagttttaaacaaaatatgctaaaatataagcaaaatatgtataattttaagtaatacacagacatttagagttttgattttaaaatgagttttcaattgaaaaatgcaacgaaatttaaataattaaatatagatatagttgaatggaggaagtattttatgaaatacgctggtattctagctggaggtataggctcaagaatgggtaacgtacctttacctaaacaatttttagatttagacaacaaaccgattttaatccatacattagaaaaatttattttaattaatgattttgaaaaaattattatcgcgacgccacaacaatggatgacgcatacgaaagatacacttagaaaattcaaaatttctgatgaaagaattgaagtcattcaaggtggtagcgatcgtaacgatacaattatgaatatcgttaaacatattgaatcaacaaatggtattaacgatgacgatgtcattgtgacacatgatgcagttagaccatttttaacgcatcgtattattaaagaaaatattcaagctgctttagaatacggtgcagtagatacagtgattgatgctatagatacgattgttacatctaaagataatcaaacgattgatgcaattccagtgcgtaatgaaatgtaccaaggtcaaacacctcaatcgtttaatattaatttattaaaagaaagctatgcacagttgagtgatgagcaaaagagtattttatctgatgcttgtaagattattgtagaaacaaacaaaccggttcgacttgtaaaaggtgagttatataacattaaagtaacaacaccttacgatttaaaagtagcgaatgctattattcgaggtggtattgccgatgattaatcaagtatatcaattagttgcacctagacaatttgaagttacgtataacaacgtagatatttacagtgactatgtcattgtacgtcctttatatatgtcaatttgtgctgccgatcaaagatattatactggtagccgtgatgagaatgtcttatctcagaaattgccaatgtctttaattcatgaaggtgttggtgaggtcgtatttgacagtaaaggtgtgtttaataaaggtacaaaagtagttatggtaccgaatacaccgacagaaaaagacgatgtcattgctgaaaactatttaaaatcgagctacttcagatcaagtggacatgatgggtttatgcaagattttgtgttgctaaatcatgatagagctgtaccactacctgatgatattgatttaagtattatttcatatacagagcttgtaacagtaagtttgcatgctattcgtcgttttgaaaagaaatctatttcaaataaaaatacatttggtatttggggtgatggtaacttaggttacattacagccattttattacgtaaattatatccagagtctaaaatatatgtctttggtaaaacagattataaattgagtcacttctcatttgttgatgatgtcttctttattaataaaatacctgaaggcttaacatttgatcatgcatttgagtgcgttggtgggcgtggtagccaatcagcaataaatcaaatgattgattatatttcaccagaaggaagcattgcactgttaggtgtaagtgagttcccagtagaagttaatacacgtctcgtattggaaaaaggactaacgttgattggtagtagtcgaagtggttcaaaagatttccaagatgttgtagacttatacattcaatacccagatattgtagataaattagcgttgttaaaaggtcaagaatttgaaattgcaacaattaatgatcttacagaagcttttgaagcagacctgtctacatcttggggtaaaacagtattaaaatggattatgtaaatagaaaaggatgaattaacgttggttaaaagtaagatatatatagataaaatctattgggagcgtgttcaattattcgttgaaggacatagtgaaaacctagatttagaagatagtaattttgtattaagaaatttaactgagacacgtacaatgaaagcgaatgatgtcaaaatagatgggaatcaattcgtttgtcgtttcaatgtagctatcttagataatggttattacttacctgaagataagtacttattagtgaatgagcaagaacttgattatattgcacagttaaacccagatgtgattaatgatgcatatcaaaatctaaagccagaacaagaagaagaatacaacgaattagaaacacaaaatggtaaaatcaatttcttattgcagacttacctaaaagaatttagaaaaggcggcatttcaaagaaaacggtttatactgttacacctgaaatttctagcgatgttaatgaatttgtccttgatgttgttgtaacgactccggaagttaaaagtatttatatcgttcgtaaatataaagaattacgtaagtatttccgcaaacaatcatttaatacaagacaatttatttttaaagcgatatttaatacgacgaaatttttccacttgaaaaaagggaatacggtgttgttcacatcagactctagaccaacgatgtctggaaactttgaatacatctataacgaaatgttacgtcaaaatttagataaaaagtatgatattcacactgtttttaaagcgaatattacagatagacgtggcatcatcgacaagtttagattgccatatttacttgggaaggcagactacatctttgttgatgactttcacccattgatttatacagtgcgttttagacgttctcaagaagttattcaagtatggcatgccgttggtgcctttaaaacagttggctttagtcgtactggtaaaaagggtggaccatttattgattcattaaatcatcgtagctatacaaaagcttatgtatcatctgaaaccgatattccattctacgctgaagcatttggtattaaagagaaaaatgtagtgcctacaggtgttccacgtactgatgtactatttgatgaagcttatgcgacacagatcaaacaagagatggaagatgaattaccaattattaaaggtaagaaagtcattcttttcgcaccaacatttagaggtagtggtcatggtacagcacattacccatttttcaaaattgatttcgaacgtttagcaagatattgcgaaaaaaataacgcggttgtattatttaaaatgcatccatttgtgaaaaatagacttaatattgcagacaaacataaacaatattttgttgacgtttctgactttagagaagttaatgatatactgttcataacagatttattaattagtgactattcatctttaatatatgaatatgcagtatttaaaaagccaatgattttctatgcatttgatttagaagattatattacgacgcgtgatttttatgagccatatgaatcatttgttccaggtaaaattgtgcaatcatttgacgcattaatggacgccttggacaatgaagattatgaaggagaaaaagtcattccattcttagataaacattttaaatatcaagatggtcgatcaagtgagcgtttagtcagaaatttatttggtagctaagtttatatagtagtcaaagtgggagaggtataatgatgaaattttcagtaatagttccaacatacaattcagaaaagtatataacagaattactcaatagccttgcgaaacaagattttccgaaaactgaatttgaagtggttgtagttgatgactgttcaacagatcaaacgttacaaatagttgaaaagtatcgcaataaattgaacttgaaagtaagtcaactcgaaacaaattctggtggtccaggtaaacctagaaatgtggcgttaaaacaagcagaaggtgaatttgtattatttgtggactccgatgactatataaacaaagagactttaaaggatgcagcagcatttattgatgaacatcactcagatgtcttattgattaaaatgaaaggtgttaatggtcgtggtgtaccacaatctatgtttaaagaaacagcacctgaagttactttgttaaattcaagaattatctatactttaagcccgactaaaatctatagaacagcattactaaaagataatgacatttattttccagaagaattaaagagtgcagaagatcaattatttacaatgaaagcatatttgaatgcaaatcgaatcagtgtgttaagtgataaagcgtattattatgctacaaagcgtgaaggtgaacatatgagtagtgcgtatgtttcacctgaagacttttacgaagtcatgagattgattgctgtagaaatattaaatgcagatttagaagaagcccataaagatcaaatcttagcagaatttttaaatcgtcattttagtttttctcgtacgaatggcttctcatttaaagttaaactagaagatcaaccacaatggattaatgctctaggagactttatacaagcagttccagaacgtgtagatgcattggtgatgagtaaattacgaccattgttgcactacgcgagagcgaaagatatagacaactatagaactgtagaagaaagttaccgtcaaggtcaatactaccgttttgatattgtagatggtaaattaaacattcaattcaatgaaggcgaaccatactttgaaggcattgatatcgctaagccaaaagtgaaaatgacagcatttaaatttgataatcataaaattgttacagagctaacgctaaatgaatttatgattggcgaaggacattatgatgtcagacttaaattacattcacgaaacaagaagcacacaatgtatgtacctttaagtgtcaatgcgaataaacaatatcgttttaacattatgttagaagatattaaagcgtatttacctaaagaaaaaatttgggatgttttcttagaagtccaaataggtacggaagtatttgaagtgcgtgttggtaatcaacgtaataaatatgcttatactgcagaaacaagtgcattaattcatttgaataatgatttttatagattaacaccgtatttcacaaaagactttaataacatttcgttatactttacagctattacattaacggattcaatctcaatgaagttaaaaggtaaaaacaaaatcattttaactggtctggatcgtggttatgtatttgaagaaggtatggctagtgtcgtgctaaaagacgacatggtgatgggaatgttaagccaaacatcagaaaacgaagttcaaatcttacttagcaaagatattaagaagcgagacttcaaaaatattgttaagttaaatactgcacatatcacttatccactaaataaataataaaacccctcaaatcattgtgaactaacatgatttgagggttttattttactgtttatgacatgattatgacatttcctcgtttatcattttcaaatacattaaattgtatacactggaaatgaggaggttatctataatgataaataaaaatgacatagtagcagatgtagtaactgattatccgaaagcagcggatatttttagaagtgtgggaatagatttttgttgcggcggacaagtaagtatagaagcagcatccttagaaaagaaaaatgtagatttgaacgaattattacagcgtctcaatgaagttgaacaaacgaatacaccaggttcgcttaatcctaaatttttaaatgtttcatcacttattcaatatattcaatcagcatatcatgaacctctaagagaagaatttaaaaatttaacaccttatgtgacgaagttatcgaaagtacatggacctaaccatccatatttagttgagttaaaagaaacatacgatacatttaaaaatggcatgttagagcatatgcaaaaagaagacgatgtcgattttccaaaactcattaaatatgagcaaggtgaggtagtagacgatattaatactgtgatagatgatttagtttcagaccacattgcaacgggacaattgttagtaaaaatgagcgaattaacatctagttatgaacctccgatagaagcgtgtggtacttggcgactcgtttatcagagattaaaagcacttgaagtgttaacacatgaacacgtacatttagagaatcacgtattatttaaaaaagtatcataactaaataacgcgattagaaactgttggcaaaaataagtccagcagtttttcgctatgtataaaagtcataatagtgacatgaacatcattatttgaaaagaaaaatgatcaatatagtataagaaatgatatgaaattttaatgctgtagataattaaatcgtagcgtgattttttaataatttattcatgaattttacatgcactattatgataaaataaacataattataattcactgaggtgctatcgtgctatcgctaacaatgttattacttgagcgtgtaggtttaattattattttggcctatgtgttgatgaatattccatattttaaaaacttaatgaatcgtcgacgtacatggaaagcacgttggcaattatgtattattttcagtttgtttgccttaatgtctaatttaactggtatcgtcatcgatcatcaacatagtttgtcaggaagtgtgtacttccgtttagatgatgatgtatctttagctaacacacgtgtattaacgataggtgtcgcaggattagttggtggcccttttgtaggtctatttgttggcgttatttcaggtattttcagagtgtatatgggtggggcggatgcacaagtttatcttatatcatctatatttatcggtataattgctggttattttggcttacaagctcaaagacgcaagcgttacccgagtattgcaaaaagtgccatgattggaattgttatggaaatgattcaaatgttgagcattttaacattttcccacgacaaagcatatgcggttgacctcatatcattaattgcactaccaatgattattgttaatagcgttggtacggcgatttttatgtctattatcatttcaacattaaagcaagaggagcaaatgaaggctgttcaaacacatgatgtactgcaattgatgaaccagacattgccgtattttaaagaaggattgaatagagaatcggcacagcaaattgcgatgattattaaaaatttaatgaaagtatctgccgtagcaattacaagcaaaaatgaaattttatcgcatgtaggtgcaggtagtgatcatcacataccaacaaatgaaatattaacaagtctgtctaaagatgtattgaaatcagggaagttgaaagaagttcatactaaagaagagattggttgtagtcatccgaattgcccgcttagagcagctatcgtgataccacttgagatgcatggttctatcgtcggtacattgaagatgtattttacaaaccctaatgatttaacttttgtggaacgtcaacttgcagaaggattggcaaatatttttagtagccaaattgaacttggtgaagccgaaacgcaaagtaagttattgaaagatgctgagattaagtcattacaggcacaagtgagtccacattttttcttcaattcaattaacacgatttcagctttagttagaataaatagcgaaaaggcacgagagttactattagaattgagttattttttcagagcgaatttacaaggctcaaagcaacatacgattactttagataaagagttaagtcaagtgcgtgcatacttatcactcgaacaagcacgttatccaggaagatttaatatcaatattaatgttgaagacaaatatcgcaatgtgcttgtaccaccatttttaattcaaattttagttgaaaatgctatcaaacatgcgtttacgaatcgaaagcaaggtaacgatattgacgtgtcagtgattaaagaaactgcaacacatgtacgtattattgtacaagataatggtcagggtatttctaaagataaaatgcatttgttgggagaaacatctgtagaatcagaatctggaactggtagtgctttagaaaatttaaacttacgcctaaaaggattatttggaaaatccgcagcattacaatttgaatcgacatcgagcggtaccactttttggtgtgtacttccttatgaaagacaagaggaggaataaatatgaaagcattaatcatagatgatgagccattagcacgtaatgaattaacatatttattaaatgaaattggtggttttgaagaaattaatgaggcagaaaatgtaaaagaaacattggaagcactactgataaatcaatatgacattatatttttagatgtcaatttaatggatgaaaatggtatcgaattaggagctaaaattcaaaagatgaaagagccacctgcgattatttttgcaactgcacatgaccaatacgcagtacaggcatttgaattaaatgcgacagactatattttgaaaccgtttggtcaaaaacgtattgaacaagcagtcaataaagttcgtgcgactaaagccaaagatgataatagcgcaaatgcaattgcgaatgatatgtcggcgaattttgatcaaagtttacctgttgaaattgacgataaaattcacatgttaaagcaacaaaatattattgggattggcacacataatggtattacaaccatacatacaacgaatcataaatacgaaacaacagagccattgaatcgttatgaaaaacgattgaatcccgcttatttcatacgtattcatcgttcatatattattaacacgaaacacattaaagaagtgcaacaatggtttaactacacttatatggtaatattgacaaatggtgtcaagatgcaagttggacgttcatttatgaaagattttaaagcgtcgataggattactttaacagtaatccttttttttatgcattttacctatgatattttgtatttcggactaaaattcacgcaaatcaaagtgagccatctatactttagttaaatcaaacgtaggaggcaatggtcgtgaaacaacaaaaagacgcatcaaaaccagcacacttttttcaccaagtcattgtaattgctttagtactctttgtatcgaaaataattgaatcatttatgccaattcctatgcctgcatcagtaatcggtttagtattattatttgtattattatgtactggtgctgttaagttaggcgaagtcgaaaaagtaggaacgacactaacaaataacattggcttactcttcgtaccagccggtatctcagttgttaactctttaggtgtcattagccaagcaccatttttaatcattggactaataatcgtctcaacaatactattacttatttgtactggctatgtcacacaaattattatgaaagttacttcgagatctaaaggtgacaaagtcacaaaaaagatcaaaatagaggaggcacaagctcatgattaaccacttagcactaaacacaccttacttcggaatactgttatccgttataccatttttcttagcaaccatattatttgaaaaaacaaatcgtttcttcttattcgcaccgctatttgtcagtatggtatttggtgtggccttcctctatttaacaggaattccgtataaaacttacaaaataggtggagacattatttacttcttcttagaaccagcaacaatctgttttgcgattccgttatataaaaagcgtgaagtgcttgttaaacattggcatcgtatcatcggaggtattggtatcggtacagttgtagcgttattaattattttaacttttgcgaagttagcacaatttgccaatgatgttattttatcaatgttacctcaagcagcaactacagcgattgcgttaccagtatcagctggtatcggtggtataaaagaattaacatcattagcagttattttaaatggtgtcattatttatgccctaggtaataaattcttgaagcttttccgaattactaaccctattgcccgaggattagcacttggaacaagtggtcacacattaggtgtagcaccagccaaagaattaggacctgtagaagaatcaatggcaagtatagctttagtgttagttggtgtagttgttgtagcagttgtgcctgtctttgtagcaatattcttctaaaacgaaaaacctaagcaagataatagcaatttgagccattgttattatcgtaaaaaaacgtctatactccggtttataactgggatatagacgtttttatgtatttattactttttactaggttttatggtatttaggcgttcgttttatgtattgcggcttttgaaaaatgatagaacgaattaatttaactaagaattaaaatgtaagttatatcatttgtgaaatttcaattaaatatttttcgacaaattcttgaaattacttaatgtcatcaacactttataaaaaaacggcgtatgcttatatgtaagaatgcaattaagaggagattttataaatgagtatgcaaagttcatataaacgtttagttaaagtgctactaacgattttagtgattgtgttttcaattttactagtaggtggttggtatatttttaaaaatgaagcacctcgtccaacaaagatagtagatcaacaaggtcatacgcttgttacaaaaggcgagctaatcagtgggcaagcgatatatgagaaatatgggttaacagattatggctcctacctgggcaatggttcctacttaggcccagattatacagcagaggcattacatcattacctgattggtatgcgtaaatattatgcacaagatatttatcataagcaacttcataaattaaatcatgcagagttagccgtagttaaagataaagtgatgaaagaaatacggattaatcgttattctgaaaaagaagatcaacttgtattaacgccaggacaagtatacggtctaaaatatttgcaagattattataaaaaagagtttgttaataaccctaaacaagtagggttaaatgaaaatatgattaaacagtttcaaaatgatgattatatggtcgcaggaaataaagttgaacatttaagtcaattctttttctggggtgcttggctatcatcaacagatagacctggaaaaacattttcatatacaaataattggccatacgatgtggatgcaggaaatacgttgcctagtgcaggaattttatggactgctatatctgtaacattactgattgcaggcttggcattcattatatatattcaaaagcgttatgaatttgacatgaagccgacgtatgagtcggaacgggaactaccaaagattgaagtagatagtaaaatcactgatagtcagcgaaaagttgggaaatatttagtcgttgtcatgttactatttttggttcaaatattattaggcgaattactggcacattattatgtagagaataaattttttggtatagaaatacaaaggctctttccatttaatattgcgaagacatggcatgtgcaattagttattttctgggttgctacgacttggttagcagcaggaatatacattgtacctaaagtattgggcaaagaaccaaagaaacaaggcgtattagtagatatcttgttttgggccttaatcatagttgtgatgggcagcatgattggagaatggggtcatattttaggttggattgattctcattggtggctattcgggcactttggttgggaatatatagaattaggtaaattttggcaaatattatttatagtaggtatggtcttatgggttatcattctttgtcgaggatttttaccagctattcgcaacaaagtacaagcgaatcatgataaacgtcacttattgacgctattgtttgttggagcaattgcaattccgttattttatcttgcatcattatttataatgccgaattcacatgtgacgtttgcagattactggcgatggtggattgttcacttatgggttgaaggtatatttgaagcatttgccgtagtgttgattggtttcttaatggttaatatgaaattaactaccattgaaacgacgattcgtgcattatattttcaattaatcctattactaggtacaggtattgttggtatgggtcatcattactattggcaaggtgatcattccatatggctagcactgggttcttgtttttcagcattagaagtcgtgccactttgtttattaatttgggaagcatacacacactatcgcttatataagaaaagtgacatcgcttttccttacaaaggtacatttatttttcttgcttcaacaggattgtggaatgcaattggtgctggagcattaggctttttaattaacacaccagcagttaactactttgaaatggtacgcaatggactgcagcacatgcccatggttctatggctggcgtgtatggtatgttctcaattgcaattgcgttgtatgtttttaaaaatattactaaaaaagaattttggacaccgaaagttgaaaaatggattaaaatatcatgttgggctttaaatgttggcttggcaggtatggtgttcattacattaatgccagtaggttatatccaacttaaagatgcattagaacatggttattggcattcaagactaacgtcattttatgaacaaccacttgtaaaagcaatcatgtggggtagaatgccttgggacattatattcacagtaggtgtcattatattagtagttatttttataaggggatacagacacttaaaaccaaaatacagagtatagatcatcttattactgagtgatcttagtgtgttttaacgtttgagacgaagagatattatacaataggattcaaactataagttcttagattatgtatatataaagaacagtaaaaagtaattttctgattgaaaatgtacttctcactgtttttaaagaaattatgtcctataaaacgtctatactccggtttataactggaatatagacgttttgatgtttgtattactttttactaggaatataaaactgtgcatgacgataatgaaatacgatgtcagatgaatcaaaaggtttgccagtcattgtataaaacgtttggtgataacgtaaacatggttcacctgcagataattgtagtaatgaagcttcacttgaagtgagttgatctacattaaagaaaatatctgaaaaaccaatacgaagtttcatgtttgattctaaataatcgaagatagagcccttagcaatatcatcatttaaatatttcacgatttctttatgataataagaatattcgatacataaaacatcatcgtccacgaatcttaatcgctctaaatagtagacggtatcatctgcatttaattggagctcatcttgtacagatttaggtggcgttgcaatctccttaaaaacaagtaccttacttgtcattcgatgttcgcctaaacttttagaaaaaccattggtcttaaaaacattgatacgatttgcatctgcaatatttctcacataaataccactgccttgtgcttgatagatcaaaccatcttgttccaataagcctaatgctttaatgatagtactcttacttacttgataacgttcttttaattgcgtcacgcttggcaatttatcaccgggtttgaaattagattgatgtataaacgcattaagttgcttagcaatatgttcatactttaacaatattctgtcctcgtttcactttgtctgtaattattatagcacaaaatattataattgtatcggcgtttacaaattgaaccggtacaattataattatgataagtcatatatttccattctattatcaagttgagggggtaatacttatgggcaataaatataaagattatgctcaagacatccttacagctgtggggggtgtcgaaaatattgttaatgtatcgtatgatacggtacgcatgaccattcatatgcatcatgcaattccttctactgctaatgaagtaacacaaatagatggcgtggcgtcagttgatgaaaatgaaacacagttagttatcgtatttaatgaagaagtaaaatatgtatatcaacaattacaattgttaatggacgacgccaagcatcaagaagatacgaatcatgatgctgtggatactcaagaaacagaacagaaagcgcaagcaaaagtgacaacaccaattttagtgaaagcaccaatcgctggtcgtcgtattttacttaaagaagtaagagattcaatttttagagagaaaatggtaggcgaaggcttggcaatcaaagctcatgaagaatccaaagtaatcgcaccgttcaatggtttagtatctatgattgtaccaactaagcatgcagttggtattcaatcagaagacggtgtggacatagtcattcatattggtgtgaatacagttgacttggaaggtaaaggattcgagtgctttgtaaagcaaaatgatcgtgttgaagcagggcaaacgttgttacaattcgaccagcaatatatacaacaacaaggctacaatgctgacgttattgtcgttattagcaattctgccgatttaggaaaagtagaactgacaatgaatgaaatcattacgactgaagatgttatttttaaaatatttaaaaactaggagtgtgttgtaataatgacaaaattaccgcaaaattttatgtggggtggcgctcttgccgccaatcaatttgaaggtggatatgataaaggtggtaaagggttaagtgtaattgatgttatgacgagtggtgcacatggtaaagcacgtcagattacagaatctatagatcccaatcactattatccaaatcatgaaggtattgatttttatcatcgttataaggaagatattgccttgtttaaagaaatgggattgaaatgtttacgtacgtcgattgcttggacacgtatctttccgaatggggatgaagatgtgccaaatgaagaaggacttgccttttatgatcgtatctttgatgaattaattgcacaaggtattgaacctgttgtgacgttatcacattttgagatgccacttcatttagcgaaacattatggtggatttagaaatagagaagttgtcaattattttgtgcattttgcgcgtgttgtatttgaaagatataaagataaagtgacatattggatgacgtttaatgaaataaataatcagatggacacatcaaatcctatctttttatggacgaattctggggtagcattgacagaaaatgataatcctgaagaagtcttgtatcaagtagcacatcatgaacttttagccagtgctttagcggttcgtcttggtaaagagattaatccgaaatttaagattggaacaatgatttcacatgtacccatttatccatattcgtgtcatccgaaagatatgatggaagcacaaattgcgaatcgcttacgtttctttttcccggatgttcaagtaagaggttattatccaagctatgctaaaaaaatgttggcacgaaaaggatatgattttggatggcaagaaggggacgacagtattttacagcagggcacggttgattatattggctttagttattacatgtctacggctgtaaaacatgatgttgatactacagttgaaaacaacatagtcaacggtggtttgaatcattctgtggagaatccgcatatcgcaacgagtgattggggttgggcgattgatccagatggcttaagatatacattgaatgtgttatatgatcgttatcagttgccactttttattgtggaaaatggttttggtgcagttgatgaagtggtagatggacatattcatgatgattatcgcattgaatatttaaaagcacatattacagcagcgatagaagcagttgatcaagatggtgtagatttaatcggttatacaccgtggggaatcattgatattgtttcatttacaactggtgaaatgaagaaacgctatggtttaatatatgttgatcgagataatgatggtcgtggcacgatggaacgcttgaaaaaagattcgttctattggtatcaacaagtgatagcatcaaatggagataaattataaaggtacattataagtattttagggttagagcccgagacataaattaatatggtaggccctaaagtgttatattggcgggcccccaacatagaagctggcggaaatacagcttacaataatgtgcgagttggcaggcccccaacacagagaaattggaacaccaatttcaacaggcaatgcaagttggcggggccccaacatagagaatttcgaaaagaaattctacaggcaatgcaagttggagaaggacagaaataaattttgcgaaaatatcatttttgtcctaatcccgtgatgttaaaattttaagaaaaaaataatgccactaactaagtatgtatagtgttaatgtttgagtatttataaaagtctttaaccaaaattgatgacctactaatcaacgataacgatattgttaagtagatgattagtgtcacaaagaaattaaagtaacagtcaaacatagatataaagtacagttagtggcattatatttagtgctcttttttagcgacaaaagtaatataattcatatctttacgcaatttagtcatcgttttaaacattttacaaaacattggtcgattttctttttttaaagcattgttgataatctttatagttccaacaataccttcgtcataaattaaaccttttggtgtcattaaactcattggaccagtatgataatgtacatgattaaaaccagcttgatgatataaatctaaccagccaagtttcgtctgcggtgagacattgacattaattgctgcagataatgatttaactacatgtgtggcatgtgattcattaacgatgacaatatcatgtgttaacaagatacccccaggctttaagactcggtagtactcgcgtaatgctttttcctttatggcgatgggtaacattgttaacattgcttcatttaaaacgatatcgaattgattgtcatcaaagggcaatttaacagcattcgcttgttgaacttgaatatatgattcaagacctgctgctgaaatattttcctgtgctttttctaatgctttcttatttatatcaacgccttgaatgtgacagccgtatgtatgagctagataaatagatgttgtgcacatattacatgccacttctaacacttgcttatcttgtgaaaatgccccttgttgtattaaccaatctgttgcttctttaccaccggggcgtagacgagtttttcctaatttagctaaaaatgtatgaccagcttctttggacataacataacctccttttaattgataattattatcattaatatagcatatttatatgcgataatttggaagttaacaagattacaaaaaattgtcacttcatttataactaaacatgagtcttcaagcataggtttagtggaaaattatttctaatagatgatgttttataaagataaaaaagcacagccatgatatacgaatgttgcatgttatatgctaaaccttcatatcatagctgtgtttgattcatttaaacttgatttacttcttctagtagaggaatagatgcttgcgcgccgtgtttttgtacagtgagtgagctcgctttattaccaaaatcaatagcatctgctaagttatcttgcgacttgtttaagcgactgacaaatgcaccaataaatgtgtcgcctgcagcagttgtatcaatcgcatttactttataagcttcgatgtgttggctttgatttttagtagcaaaatatgtaccttgcttacctagcgtaatcaaaacagtcttaatgcctaaagataaaaagtaattggcattgtctttcatagattgttcatttgttactttaatcccagataacaattcggcttctgtttcgtttggcacaataatatcgattaatgacaataattcattaggtaatgctttcgctggtgcaggatttaatacagtcgtcacaccatgtgccttggcaatttcaaatgcagatataatagccgggatgggtacttctaattgtgcaacgacaaagtctgcattgattatagcgtcttttgcgttaataacatcttcaggtgtcatcgtcatattcgcaccaccataaacatagatggtgttttgtccttctgcattcacagtgataaaggcttggcccgtttttgcttcagctgttttgataatatatgacgtatcaatatgagccgctttaaaatcttctaagatgaaatcagcaacgccatcagtgccaattttagtaataaatgttgtgtctgcttgcatgcgtgcagtggcaatagcctggttggcacctttacctccgccgaatgctttttgtgcttcttcaacatgtaatgtttcgcctggttgtgcatatctttcaactgttaaaaattgatcgacattcgttgaacctaaaataacaactttgttggtcatgtgtatgctcctttcaagttataatttttaaaaagtaacattcgattctaatgcaatattagagtagggcgttgtctcaccagtacgaatattacctttatttaatgggtgagctaagttacttttcatttcttcgtgaggaatgaaaatgatttcgatttccgatgaaatcaattgtttaatttgttgcaattgtgtagggttatgttcttttatttcttctgctaagtatattttttggatttccatttcttctaacactgtagctaagacatcaataaagcgcggtaagttttttgtgacagctaggtcgatacgacgatgatcatttggaattggcatgccagcgtcattaattgttaatagatcaaaatgaccaattgtcgcgattgcttttgaaatatgttcatttaaaacagctgattttttcatgacatctacactccttattttataaatactgtaacagaagcggctactaaaatgagtactaagccgatgattgtaataaccatttcttttgacgttttatgttgttttaagaaataaataccagttaatgtagcaagcacaacggatgtttgagaaagaataaatccagttgctaaaccattcatattaggttgtgctgaaataagatatgttaaggcaccaaatgcaaagaagaaacctgaaataatttgtaaccacgtaattttattacggaatggattctctgctttcatattcataaagccataaatgactgcaacaattaccatacccattgcttgaggtaaaaaggcagttaggccatcaatagaagttgcttgcggtgcagctgaatataaccagtatccaaattcaccaattaacagaagtaccactgcacgacgtaaatttttggcgttacttgcttctttgcgttcactccaaactgtcatacgcgcaccaattagaataacgactaaagctgtaaatccaatgattttatgaccaatgcctggccaatttcctaatgcaaagacaccccataaagatgcgcctaataattggaatgctgttgtgactggcatggcacgagatgagccgactaattcgaacgctttaaatgtaatgatttgtccgaatccccatcctgcacctgataataaggcgaatagcaaattggttccagtaggaaagccacttgatgtgactacggctaatataatagcgaagattaacgtacctacagtagcaccgataatttgatgtacaggtttaccaccaaactttgaagcgactgttgggaagaagccccagccaattaaggggcctaacccgataagtaatgcaacaatgctcatgttatacacctcacgatttgtttttagtaaaacgttttaccagtgccatcgtaccatttttatttgtaaaatgcatgcgttttcataaaagctgaaaacgcttaaatcatatttgaaaattcatacattattattttaatttcatagtgaaataattatgattaaaaaccctcagcattaaagcaacgctaagggcctaacaatgatgagtatatttcggaagatacgtagttagtttgaaagatgatagccagttgttgcacgaatttttaaagtcgttggtaattcaatcatatcaatggatttatctaagtgctgtaatcgttgaagtaataaggttaaagatgttttgccaatatcagttataggttgtgccacagtagttaaaggtggcgagacgtacgctgcataatcaatgtcgtcataacctattaatgagatatctttcaggatactgatgccatgttcaattagtcctcgtaaaatgccaatagcgagttcatcgttaatagcgaagattgcagtggcagattgaaccatgatgtcatcaacaatggttagcccaccacgcttagataattcagtatggacgatttgtggttctggcaattgattcgcgcgcaaagtatcaacaaatccagcgacacgagtcgacatattcgccatcatgtcatatggtgcaacaatcatcatattgttgtgaccgagttctattaaatgttgtgctgcaagttgtccgccttgatattcatttgtccgaacaaaatctgtatagccttgatggtcattttgatccagtacgacataaggtacatgatgtttctttagatagttatttagggcgtccggggatgaaatgtattgtgcgataattaatccgtcaatacctcgatcaattaaatgtttaatattgtcatacaaatcagttgctgtagatgttaaaaagcataaatcaacatcagatggtttatggtcatgaatactttgcatcagtgctgagaaaaacggatttgttaagctaggtaaaatgacgccaatagtttgaattttactgccgcgcaattgttttgcatgtttgttaggggcgtagcctaaacgttctgaaacagcatgtacgttttttatcgttgttgcggaaaaacgactatcattatgatttaaaatatgtgacacagttgtgactgatacaccagcttctctagcaacatctttaattgacacttttttcatattatattccttctctttattgtgtaattaatcatacagttatatacccgattattatattcatcatatcatgataaacatttgatgacatatgaagacgtgaatgacttttattgtctacaaacagacgcctatagtatgcgattaaggttgaggcgagagaatatattattaaggttaataccttttaatggttatgataactagaattttaaaatgtttattgtgatgaaaaatacaaaagtcattattttgaagaataaaatatttgtttttgaaaaaagtattaaaaacataacaaaatgatgtatattgaactatgtgattgaaaaaatttttaattaaggcttgttaaaacttaagagaggatgtttttaaatgcaattcaaattaaaagaagaagagattattagttttttagaattgaaatatccagaaaaagagttcgaatatggtcgtttgttagttggacaacataaacgcgatgatttagatgtttattactttggcgatacgtttttaatgtgcacgattatttcattcaagacatttgaaattaaagaaacagtagaattatcatatgatgctgttaatcgtattgtgttaaaagatggatggttatttagaaaaatgagaatagaaacaatgcaaaaagtgttaaaatacggtacatctaaattaatgttaactgattttcaaaaggacaattataataaatatattcaaggtcagaaacaacgcgtgatatttgaaaatggccattttgtctaattgatagtgaataataattagaataagcgaagaacaatgaaaaatgttcttcgcttatttttatagaatttgatgtatatcattttaaagtgataaagatatttcgaaacataattcttctattatatttaagatttaactgtttttagaatgatcatgtatgcagacaatgagccgagtatcattaatacaatgctgacgatgaatgttacagttgcagctacacttggtgcatagtttagttgtaacatactgaaaactgtagtacttagtgctataccaaaggcgccacctaatgtaccactcattttatataatcctgtagctaaaccaactttttcatttggcatactgaaaattgcaattgtaaggccgggtgttgcgactaaaccatttccaattgcgcaaatgacaaacccaataacaacagcaatgatatattgtgatggttgaagtgatgtcatgctaataatagtgatgccgatgacagggaacaacggaccaatgatgagcatcaatttgccaccgaaacgtaatgttgctttttcacctaaacgaatcatcgcaactgccacaatggcatatggcaatgtaacaagtccagattgcgcagctgataaaccaaggtgtgtttgagcatatatgaaaaagaccactgttacgcctagaccgctatttaaaacaaagttatttaaaaatgcaccaatgaacggacggttgcgtaatactgagaaatcaataaaaggtacttcatgtcgacgttcgatgatgatgaatatcagcgtagtgatgataaaaatgctcagacaaatgaatgaaaatgtactaaaccaaccttgttcgaatccttgtgttaacaataatgtaaagctaccaatcataacagcgaaaatcgacatacctttgtaatcgaatggatgacggtggctatgttgacttactttttcaggtgtgccttttagaagtaatatggcaatgaaagcaatgcctatactaatgatgaaattcgtttgccatccgaaatttgtggcaattaaaccgccgataacaccagctaggccaatgcccccaacagtactaatcattagataactaatcgctcgtcttaaatgttctcctttaaattgattatttaaaacgccaactgttgaaggtaacaagatagctgctgatagaccttgtaaaattctaccgatgatgagcagtgcagtgatgtccgatataattaatagaagagatgcaaacatactgattatgagacccatgtatgtcattctcagttgtcctattttatcagcaatatcacctgcagctaccatgaagatacctgtggcgaaggaagttaaactaatagataaatttaacacggcaggagaggtttgatacgtttgaccaacgagaggtcctatattaataaatgattgtgcaaacaaccaatatgttaatgcagacaacataatcgcaataataatattactgcgtggtgaagattgtgtgttattcacagatgtcactccttgtaaaaattaaatatagaaagtcatgagatgaggtgaacggatgtatagatgatcgttcactcacacataagtcatgatttccttacatatcataccacagttattgagaatgaatatcaattaattgcttgtatgattgattttttataatatgtttaagtgaaacagctttatttgaaagtgattaaagtaaatgaaggtacagaggagtgagaacaatgtgcacaggattcacaatacaaactttaaataatcaagtacttcttggacgcacgatggattatgattatccattagatggttcgccagcagtgacgcctagaaattatcgttggacatctcgcactggcacgacaggccaaacccaatatggctttattggcacaggaacagatatggaaggttttatttatggtgatggtgttaatgaacatggcgttgccatttcaacacaatatttccgaggttatagttcatatggatcaacacacaaagcggacgcgatgaatattacgcaaaatgaaattgtgacatggattttgggatatacaacaagcattgaagatatgaaacaacaagcatcccaaatacatgttgtagcggtatatttaaatgatatcggtgaagttccgccattgcattatcatgtttccgatgtaactggacattcagccgaagtttcatttaaagagggtgaagtggttataaaagataaccctattggtgtcttaacaaatcatccagacttagattggcattatagtaatttaagacaatatatcaatatttctccttatccagcaacagcaaagttattggaaggtgtatcgattgaacctttaggcaatgaagcaggtacatttggattgccaggtggatttacttcaactgagcgctttgtgagaatggcatttatgaaagcaaacattgctcaaaacaatgataaagaaatggatttaatgaatgcattttatttattagatgcggtaaatataccgattggaattgtacgtccgcatgatgctgacaatcactatacgatgtatcagaccgtaataaatttaactacaagaacgttatatattaagtattatggcagcaatgaaatagtagcattaaagctcacagatgatctaattaatagaaaagatatgatgatttttaagcctgagaagcatatcactattagaaagttgaatgacaatcaatagcgattgaaaatggaatttggttgatatgatttgatggatgattactatcatacattagcgttgaaccgcgaacatggacgaatgattagttgttaattttgaaaatttataaaagcttaagcgaacgcagtgagagatgtcattttaatatcaatgtatggctattttgtaatgacaatgtaatgagtttagtaaaacatttcgggaatattaaatagttggaaaatgagaattaaatcctttactcagttgtctaattcttttagtatgtgcagtacagtttaattgaaaactaactttaactttaatggaggatgttttatacatgaaaaaattaacagcagcagcgattgcaacgatgggcttcgctacatttacaatggcgcatcaagcagatgcagcagaaacgacaaacacccaacaagcacatacacaaatgtcaacacaatcacaagacgtatcttatggtacttattatacaattgattctaatggggattatcatcacacacctgatggtaactggaatcaagcaatgtttgataataaagaatatagctatacattcgtagatgcacaaggacataagcattatttttataactgttatccaaaaaatgcaaatgccaatggaagcggtcaaacatatgtgaatcaagcaacagcaggagataacaatgactacacagcgagtcaaagccaacagcatattaatcaatatggttatcaatcaaatgtaggtccagacgcgagctattattcacatagtaacaacaaccaagcgtataacagtcataatggtaatggaaaggtcaattaccctaatggcacatctaatcaaaatggcggatcagcaagtaaagcgacagctagtggtcatgcgaaagacgcaagctggttaacaagtcgtaaacaactacaaccatatggacaatatcacggtggtggtgcgcattacggtgtcgactatgcaatgcctgaaaattcaccagtttactcattaactgatggtacagtagtacaagcaggttggagtaactatggtggcggtaatcaagtaacgattaaagaagcgaacagtaataactaccaatggtatatgcataataatcgtttaactgtttcagctggtgataaagtcaaagctggtgaccaaattgcatattcaggtagtacgggtaattcaacagcacctcacgtacacttccaacgtatgtctggtggcatcggtaatcaatatgcagtagacccaacgtcatacttacaaagtagataatacagtaaatcccaagttacgatatcatacgcaacttgggattttttcgttttaataataggtataagcccattgcttgtcctctaaaacatgttgataaaaaggatcttggccaattaacttgatatcatctgcaagtgcttcaacttcatctaaatgatgggtagttaatataattaaacatttagatttcataatgttaagtagttggtggatgtcatgtctagattttaaatcaataccaactgtcggttcatctaaaataagaattcgaggttgacctagtaaacctactaatatattaattttacgtttattcccaccggacaatgtagatactttggcagacgtatcatcaaagtttaattgctgtaaatattcgttgatagttgtatcgttaattggatttttacaaagtgatttaaaaaatttaatgttttcagccactgtcatgtgctcaaataacgcaatgtcttgtggcacataaccgatgtgattttgtatttgtctttgattccatttttcgccgaaatagttgatagttccatcattagctttttcaataccagcaatcatacgaagtaatgttgattttccagcgccattatcaccaagtaatacggttaaacgattactttcaaaggacatggttaaatgattgaaaatctgtttgttgcggtaacgctttgaaaggttattaatttctatcatcagttacgctcctttacatgaaaatgctcaagtatacgatacccatagcaagtgcatatataaatgtcatgaataatcgatgacttattgtttgaatatggaataagataaagacgatacctatctcataaatcaatataagtagcagtgattttaagtaaaatattaagctgagtggttgagacaaatatagactaactgccaatagtaccaacaataacaaaatagtatgtgtcattacataagtactatatagtttgaaacggcttaaatgatattgtgataatcgttgcaatgctgcttgttggtttaaacgataatgaagtattacttgaacagcgctaacaaataaaatcaccgcaaagattaagctaattgaaatagagtgttgtgcttgtttagtaagcgacacaaatttgattttagattcaggtatatgtttatgataggacttgttgatagcatcgatggattgatgctgtttcatatcctcaaggtgttcataaataatgttaggaatttgctgttcatataatgagctactgacaatttctacagcaataccacctataaagtcatctctaccatataactgtatcgtttctttcaaacggttctcttttaatttttgagagaaacctttaggaatttgcatacttaaaatagcttcctttttagtaacatcatcttcaatatagctttcatcttcatcgacttttttaatagttacatagtcagattgtttaattttattgacgaatgattttgatgcagtggtttggtctaaatcttgaatggtaatcggtattttgaagttgtcatgtgctacacggtaacccataccaataagtacgagtgcgatgacaatggttgttacgagcaagatgtattgtaaccattgcttgaacacaacaagttgtatataaggcttcattgacgatacctccaaaccaatacagctaaattaattatcaaaagtgcgatgaagctaagatagaaactagggtgcagttctaaaatgtagttgtttaaaataatttctaacaattgatttgttacaactgcgaacggttgaatattgaaaacgccatttgctatatgttgtaaaaaaatcgtaggtattgttaaaccagataacaccaggatgacaatagctaatatgactttactaatactattcaacaagcctgttgttaaaagttcgatgattaataaccacagtattaaaaaggtaacataatagcttaaatgaatggctaacgttggccaattatataattcaaaggtattcggaatactgaacacaatccaaactacaccaacgatactccataacatagtataaaaccatgttatcaacgcacgaatgattaataaacgctctttagaaaaatgaaacattttcaatcgcgctttcaatacagtatcttgattcattttcaaaactgtaaataaagatagtgcaaagatgaataccgttgttaaaaatcctgtaattgcataataactgcccgtatcgtataaatgaatcggttctaagttaaatgcacctgaacggtttaatcctgtaatcagcaaatcagtcataacattgatactgtcagaatgtgatgctttcggtgctaggtcttgaaaagctaagatgccacccattgaccgcataaggcgttggtaaacagaatctgttagctgagatagcacgacacttttcatggattgttgatcatatgtatatactgaaattggtagttcaccttgtttataaaatgccttggtcatacctttatcaaaaacaaaatagccttgaagtttctgctgttttagcaaagtatgtgcttgcttatcatcatatgctttaatgctcacatttttacctaggttactccctttaccaatagagtttaagattaatttcgtttcacttgattggtctttatctacgacacctatattaaaatgattgtcatcttctgttacatgttggattgtcgttaatgtaataaggagtgccgctaatataaatagtaaatagataatcaaataccactttttcaataaaaaagagtggtagatgcgaaacaaatgtattgttttcatttaaccactcctccaatgataagattgaaaggcaagatgaccttccaatcttatttttatattttagttatttagatgccttttttaaaattgattcaaacattttgccgccatttttttcgatttctttttcaagtttttcacggtcttttgaagatagactattgaaatctttcgcaccactatcatcaaaatcaatatctgctttcaattttgtgctagattttaaaatgaaattaattggttcttcagcatatttgatgccgatatttaacgtagatttctgagtgttattttttacgtcagaatctatattattttcaaaagtgaattcattttcgtcgctatatttatctaacgcgacagtgattttacctttatcttgacgttttgtgccatctactttttcttggttatctaatttgatttttgattcatcatattctgtctttttaccaaattcgtatttatcactgtatttattgtctttttccttagaagatacgcctttaattgtatatttcgcttcagcatacgtgtatttatcttgatcgaaatcaagtgcgtaatctagttttaacttatcgtcttctaaagtattagtacctttgattttagttttattattttctttgtctgtaatagtaatttctcgttttacaatcgtatgtttttcggtataaattttagattgaattttagcaaattcatcctttttagtttctttgacatcgtcaattgcttttttaatgtctttttcaaagtcttttgtagtaccttgttcttccattaattttttaaggtctttatcctttttagcttcttctaatacagctaatgtaatttttttagtgtcagctctgctaagtgttaacgtgacaggtctaactttgtacttttcaccattaaccttaatttcttcttttttacctttatcaaaattatcgtcatctaatttgtcgacaataagttcggaatatttttcggcaattttgctgtagtcactttgttgtgcttgagcattactgaaaagagtatttaaatttagttgttggtttgtaataccattttcttttgctgtttcttcatcttcacctgtaagttttgaataagttgataataaatcagaattattaacactatatttccctttaaataatggtgattcgaaataatgcttatctttatctgcagctaactggaatttccctaatgcagagtctgctattgttggttcaagattaatcattgatttctcttttttaggatcatgtccatatgacattttaattttcgaagcattaacaacagatttaggaataccaagccctttaacaatttcatcagatgcatctgcgcttaattctaatgaagataaaaatgaattatctttcatcttttcttggaacttcacttcgttttcaaaacggtcattaaaataatctttatacatttttgcagtttgttgttcactttttaagtatgtatttttcggtgtgtttgcaaaaaatgcataaactccccatgcgattccacctattaataataagacaataataataggaattataatttttaactttttagacattttgcttcctcccaattatttatgagttaatcatatcagaacaatacattttattaaatggtttattttaaattttgtttaaattaatagaattttagttataataatgtttaataagttattgaaaatctaataaactacaaaaaatagtttgattacataatgattcttgaaaatgtcggttaactttaaggtgacaagttattgcaattttgaaggtagacatcatattttataatcgaataacatacaaaataaagcgaccaattttgcagtgttacgaattgtaaactgcgaactggtcgctttttattgatgtcatgattaatttaatggatgtaattatatgatgaaatttctgaagcagagatggttcttgatgaaacgatatattcaccaatccagttcatttctgaaattagaatacttccatcaatattaactttctcaacgtaggctacatggccaaatggaccgtttactgtttgtaaaattgatcctcgtgttgggtgtctatctactttgaagccattgcttgaagcttggcctgcccagtttttagcatctccccaaaatgtactaatcgtgtgtccatctttggcacgtttatcaaagacataccatgtacattgtccagcagtatataagttgttcttacttgtgataagaggctgatcaatgattttaccgttacctaaagctaaaggtttaccgtcagcagtctttgctttgtcattaaattcggcgatttgtaattcgtcatacaattcgtctaaatcgatgcctgtaataagccctttgttatcttttgaaaaagcgttatttaattcatcgtcattgtcttcaacattcggtattgctggtgtcaaaggattgcttggtgacgtttgaggcggtgtgtgtgaatcaattgcgtcattaatgtgcgtatactgaccacttaatgaagaatggtactgattgttgttaagatcacgttgatttgcgtgttgatgattgtcgtttgtacgtgactgattttgatgattgttgtttggcgcgttgcttttgtcataagtataagtatacgcgccggtgtctttattcactttgaactgtgcgtttgggtgtgctttctttgcttcttctaatgttttgctatcattcgtgtatgcttgagccgagttaggcgacatactaaataaagtaagagttgtcatcgtcagtaaaattgttttcttcataataaccatttaatcctttatgtatttaatttaattttagtatacacatttatattacaaaaatgaatggttaattaaaaatatatgggtatattcaatatatttatttaaaaaaagctaaaaatacttaaaaaactatatacatatactaataatttatatattatttgagtaaggagcactttttcaaaaaatagtgtccctaaaaagttttgataaacttaaaatattcaggaggtttctagttatggcaatgattaagatgagtccagaggaaatcagagcaaaatcgcaatcttacgggcaaggttcagaccaaatccgtcaaattttatctgatttaacacgtgcacaaggtgaaattgcagcgaactgggaaggtcaagctttcagccgtttcgaagagcaattccaacaacttagtcctaaagtagaaaaatttgcacaattattagaagaaattaaacaacaattgaatagcactgctgatgccgttcaagagcaagaccaacaactttctaataatttcggtttgcaataagcattctgaaattggcaaagtcacattttctaatgtggctttgcttatcattttttaagaaaacaactgaaaggaaataagcatgaaaaagaaaaattggatttatgcattaattgtcactttaattattataattgccatagttagtatgatattttttgttcaaacaaaatatggagatcaatcagaaaaaggatcccaaagtgtaagtaataaaaataataaaatacatatcgcaattgttaacgaggatcaaccaacgacatataacggtaaaaaggttgagctgggtcaagcatttattaaaaggttagcaaatgagaaaaactataaatttgaaacagtaacaagaaacgttgctgagtctggtttgaaaaatggcggataccaagtcatgattgttatcccagaaaacttttcaaaattggcaatgcaattagacgctaaaacaccatcgaaaatatcactacagtataaaacagctgtaggacaaaaagaagaagtagctaaaaacacagaaaaagttgtaagtaatgtacttaacgactttaacaaaaacttggtcgaaatttatttaacaagcatcattgataatttacataatgcacaaaaaaatgttggcgctattatgacgcgtgaacatggtgtgaatagtaaattctcgaattacttattaaatccaattaacgacttcccggaattatttacagatacgcttgtaaattcgatttctgcaaacaaagatattacaaaatggttccaaacatacaataaatcattactgagtgcgaattcagatacattcagagtgaacacagattataatgtttcgactttaattgaaaaacaaaattcattatttgacgaacacaatacagcgatggataaaatgttacaagattataaatcgcaaaaagatagcgtggaacttgataactatatcaatgcattaaaacagatggacagccaaattgatcaacaatcaagtatgcaagatacaggtaaagaagaatataaacaaactgttaaagaaaacttagataaattaagagaaatcattcaatcacaagagtcaccattttcaaaaggtatgattgaagactatcgtaagcaattaacagaatcactccaagatgagcttgcaaacaacaaagacttacaagatgcgctaaatagcattaaaatgaacaatgctcaattcgctgaaaacttagagaaacaacttcatgatgatattgtcaaagaacctgattcagatacaacatttatctataacatgtctaaacaagactttatagctgcaggtttaaatgaggatgaagctaataaatacgaagcaattgtcaaagaagcaaaacgttataaaaacgaatataatttgaaaaaaccgttagcagaacacattaatttaacagattacgataaccaagttgcgcaagacacaagtagtttgattaatgatggtgtgaaagtgcaacgtactgaaacgattaaaagtaatgatattaatcaattaactgttgcaacagatcctcattttaattttgaaggcgacattaaaattaatggtaaaaaatatgacattaaggatcaaagtgttcaactcgatacatctaacaaggaatataaagttgaagtcaatggcgttgctaaattgaaaaaggatgctgagaaagatttcttaaaagataaaacaatgcatttacaattgttatttggacaagcaaatcgtcaagatgaaccaaatgataagaaagcaacgagtgttgtggatgtaacattgaatcataaccttgatggtcgcttatcgaaagatgcattaagccagcaattgagtgcattatctaggtttgatgcgcattataaaatgtacacagatacaaaaggcagagaagataaaccattcgacaacaaacgtttaattgatatgatggttgaccaagttatcaatgacatggaaagtttcaaagacgataaagtagctgtgttacatcaaattgattcaatggaagaaaactcagacaaactgattgatgacattttaaataacaaaaagaatacaacaaaaaataaagaagatatttctaagctgattgatcagttagaaaacgttaaaaagacttttgctgaagagccacaagaaccaaaaattgataaaggcaaaaatgatgaatttaatacgatgtcttcaaatttagataaagaaattagtagaatttctgagaaaagtacgcaattgctatcagatacacaagaatcaaaaacaattgcagattcagttagtggacaattaaatcaattagataataatgtgaataaactacatgcgacaggtcgagcattaggcgtaagagcgaatgatttgaaccgtcaaatggctaaaaacgataaagataatgagttattcgctaaagagtttaaaaaagtattacaaaattctaaagatggcgacagacaaaaccaagcattaaaagcatttatgagtaatccggttcaaaagaaaaacttagaaaatgttttagctaataatggtaatacagacgtgatttcaccgacattattcgtattattgatgtatttactatcaatgattacagcatatattttctatagctatgaacgtgctaaaggacaaatgaatttcatcaaagatgattatagtagtaaaaacaatctttggaataatgcgattacgtctggtgttattggtgcaactggtttagtagaaggattaattgtcggtttaattgcaatgaataagttccatgtattagctggctatagagcgaaattcatcttaatggtgattttaactatgatggtcttcgtacttattaatacgtatttactaagacaggtaaaatctatcggtatgttcttaatgattgctgcattgggtctatactttgtagctatgaataatttgaaagcggctggacaaggtgtgactaataaaatttcaccattatcttatatcgataacatgttcttcaattatttaaatgcagagcatcctataggcttggcgctagtaatattaacagtacttgtgattattggctttgtactgaacatgtttataaaacactttaagaaagagagattaatctaatgttgatgaatagcgtgattgctttaacttttttaacagcatctagcaataatggcggacttaatattgacgtgcaacaagaagaggaaaagcgaatcaataatgatttaaatcaatatgatacaacgctatttaataaagacagcaaagcggttaatgatgcgattgttaagcagaaaaaagaacgacaacaacaaataaaaaatgatatgtttcaaaatcaagcgagtcactcgactcgcttgaatgaaactaaaaaagtgttattttccaaatctaacttagaaaagacttcggagagtgataaaagcccctatattcaaaacaagcaggagaaaaaaatattcccgtacattttgatgtctgtaggggcttttttgactttaggatttgtcattttttcaattcataaagggagacgaacgaaaaatgaatcagcacgtaaaagtaacatttgattttactaattataattacggcacatatgacttagcagtaccagcatatttaccgataaaaaatttaatagctttagtattggatagtttggacatttcaatatttgatgtcaatacacaaattaaagtgatgacgaaaggtcaattacttgttgaaaacgaccgacttattgattatcaaatcgctgatggagatattttgaagttactataggaggaaaaatagatggttaaaaatcatgaccctaaaaatgaaatgcaagatatgttaacacctttagatgctgaagaagcagctaaaacaaaattacgcttagatatgagagagattcctaagtcttcaattaaaccagaacattttcatttaatgtacttattagaacaacattctccatattttatagatgctgaattaactgaactacgtgatagtttccaaatacattatgacattaatgacaatcatacaccttttgataatattaaatcatttactaaaaatgaaaaattacgttacttactcaatatcaaaaatttagaagaagtaaatcgtacacgttacacatttgtgttggcaccagatgaattatttttcacaagagatggattaccaattgctaaaacaagaggtttacaaaatgttgttgatccattaccggtgtcagaagctgaatttttaacaagatataaagcactggttatctgtgcattcaatgagaaacaatcatttgatgctttagttgaaggaaacttagaactacataaaggaacgccatttgaaactaaagttattgaagcggcaacgttagatttactaacggcatttttagatgaacagtatcagaaacaagaacaagattatagtcaaaattatgcatatgtacgcaaagtaggacataccgttttcaaatgggttgctatcggtatgacaacgttaagtgttttattaattgcatttttagcctttttatatttttcagtaatgaagcataatgagcgtattgaaaaaggataccaagcatttgtaaaggaagattatacgcaagtactaaatacgtatgatgatttagatggtaaaaaattagataaagaagcactttacatttatgccaaaagttatatccaaacaaataaacaaggtttagaaaaagataagaaagaaaatttacttaataacgtgacaccaaattcaaacaaagactacttattatattggatggaattaggacaaggacatcttgatgaagcgattaatattgccacttatttagatgataacgatattacaaagttagcgttgattaataagttaaatgagattaaaaataacggagatttatcgaatgataaacgttctgaagaaacgaaaaagtataacgataaattgcaagatattttagacaaagaaaaacaagttaaagatgaaaaagcgaaatctgaagaagagaaagcaaaagcgaaagatgagaaattaaagcaacaagaagagaacgaaaagaaacaaaaagaacaagcacaaaaagataaagaaaaacgccaagaagctgaaagaaaaaaatagtataggactgaggcaaagacaatgcataaattgattataaaatataacaaacaattgaagatgctcaatttgcgagatggtaagacatatactattagcgaagacgagcgtgcagatattacgttgaaatcgttaggcgaagtcattcatttagaacaaaataatcaaggtacttggcaagcgaatcatacttctattaataaggtgcttgttagaaaaggtgaccttgatgacattacattacagctttatacagaagctgattatgcatcatttgcgtacccttcgattcaagatacgatgacgattggatcaaatgcatatgatgacatggtcattcaaagtttgatgaatgccatcattattaaagattttcaatcgatacaagaaactcaatatgtgcgcatcgtgcacgataaaaatacagatgtgtatattaactatgaactacaagagcaattaacgaacaaagcttacattggtgatcatatttatgttgaagggatatggctcgaagtacaagctgatggtttaaatgtattgagtcagaatacagtggcatcgtcattaattcgcttaacacaagagatgccacatgcacaggcagatgattacaatacgtaccatcgttcgccaaggattattcaccgtgaaccgaccgatgatattaagattgaaagaccaccacaaccaatacagaagaacaatacagtgatatggcgttccattataccgccattagtaattattgctttaactgttgtcatctttttagtgagaccaattggtatttatattttaatgatgattggtatgagtacagtaacgatagtatttggtattacaacgtatttctctgaaaagaaaaagtataacaaagatgttgaaaaacgagagaaagattacaaagcttatttggataataaatctaaagagattaataaagcgattaaagcacaacgttttagtttgaattatcattatccaacggttgctgaaattaaagatatcgttgaaacgaaagcaccaagaatatatgaaaaaacatcgcatcatcacgatttcttacattataagttaggtattgcgaatgtagaaaagtcattcaaattagattaccaagaagaagaatttaaccaacgtcgtgatgaactattcgacgatgctaaagaattgtatgaattttacacagatgtagaacaagcaccattaatcaatgatttaaatcatggaccaattgcatatattggtgcacgacatctcattttagaagaattggagaaaatgctaatccaattgtcaacgttccatagttatcatgatttagagtttctatttgtgacacgtgaagatgaagttgaaacattgaaatgggcacgttggttgccacatatgacattgagaggtcaaaacattagagggtttgtttacaatcaacgaacacgtgaccaaattttaacgtcaatttatagcatgattaaagaacgtacccaagctgtgcgtgaacgcagcagaagtaatgagcaaattattttcacaccgcaattagtgtttgtcattacagatatgtcattaattattgatcatgtcattttagaatatgtaaaccaagatttatcagaatatggtatttcattaatctttgttgaagatgtgattgaaagtttgccagagcatgtagataccattattgatatcaagtctcgtactgaaggcgaactgattacgaaagaaaaagaattagttcaattgaaatttacacctgaaaatattgataacgttgataaagaatatatcgcgagacgtttggcgaatttgatacacgtcgaacatttgaaaaatgcaattcctgatagtattacatttttagagatgtataacgtgaaagaagtagatcagcttgatgtggttaatcgatggagacaaaacgaaacatacaaaacgatggcagtacctttaggtgtaagaggtaaagatgacattttatcattgaacttacatgaaaaagcacacgggccacatggtttagttgctggtaccactggttcagggaaatctgagattattcaatcatacattttatctttagctattaattttcaccctcatgaagttgcattcctattgattgactataaaggtgggggtatggcgaacttatttaaagatttagtccatttagttggtacgattacaaacttagatggcgatgaagcgatgcgtgccttaacatcaatcaaagccgaattgagaaaacgtcaacgtttattcggagagcatgatgttaaccatattaatcaataccataagttatttaaagaaggtgttgcgacagaaccaatgccacatttattcattatttccgatgagtttgcagaattaaaatcagaacaacctgattttatgaaagaacttgtatcaacggcacgtattggacgttcgttaggtattcatttaatacttgcgacacaaaaaccatcgggtgttgttgatgaccaaatttggtctaactctaaatttaaattggcattaaaagtacaagatagacaagacagtaatgaaattttaaaaacaccagatgcagcagacattacattaccaggtcgtgcgtatttacaagttggtaataatgaaatttatgaattattccaatctgcatggagtggtgcaacatatgacattgaaggcgataaattagaagttgaagataagacgatttacatgattaatgactatggtcaacttcaagcaatcaacaaagacttgagtggacttgaagatgaagaaacaaaagaaaatcaaactgagttagaagcggttatcgatcatatcgaatctattacaacacgattagaaattgaagaagttaagcgtccatggttaccaccattaccagaaaatgtatatcaagaagatttagtagaaacagatttcagaaaattatggtcagatgatgcaaaagaagtagaattaacattaggacttaaagacgtaccagaagaacaatatcaaggaccgatggtattgcaattgaaaaaagctgggcacatcgcgttaatcggaagtccaggatatggtagaacaacgttcttacacaacattattttcgatgttgcaagacaccatcgtcctgatcaagcacatatgtacttgttcgatttcggtaccaatggtttgatgccagtcacagatataccacatgtcgctgattactttacagtagatcaagaagacaagattgcgaaggcgatacggaagatacatgatattatttctgagcgaaaaagactattaagtcaagagagagtagttaatatagagcaatataataaagaaactggaaattcaattccaaatgttttcttaattatcgataactacgacacggtgaaagaatcaccatttatggaagaatatgaagaaatgatgtctaaggtaacacgtgaaggtttagcgttaggggtatacatcattctttcaggatcaagatcaagtgcaataaaatcagctatatttactaacattaaaacaagagttgcgctgtacctctttgaaaacaatgaattaacaaatattattggttcttataaaaaaggtgtgaaagatgttaaaggtagagctgcaataaatgatgataacttcacacagttccaaattgcgcaaccatttgaattagcagaaggacaaacatataacgagcgcattaaaaatgaagtagcacaaatgaaagaattctatgtaggagattatccaaaacatattccaatgatgccagataaggtatttatggaagatattcgagaagcatatgatttggaaaaaatcattcatgaagaacacaaattaccattaggattagactttgaggatgtggaactagttagtttagatctgacaagttcttcgattgtaacagcaattaaaccaactgagatggaaaaaatgaatgatgttataatgtctagtttatcagtatatagtaaaaaccaatttgttatcttggttgatgcagaagataatatgagccagtattcagaagatgtaacctcttattattcagcaccatcagatttgagcaacattagattaggatttaagcaagaaatagaagcaaggaaaaatggcgagaaaagtatagaggaatgcaagattgtatttataaataatattaaacgattcaatcaattaactggaatgacagaagatgaaattcgtgtgttatttaatgaaggtcaaaaagttaatattatcattattgcaagtggactatactcagatacaattggtgcatttgatagagaaagtaaaatgatggtaagaactataaatcaagctttgattagtcataagatatcggaacaagaatttataagagttaaagatcgatttggtgaaccagaattaaaagtgggagaaatgtattacattaataatcaagaatatcaaaaaataaaactaatggagggatagagttgataaagttaaaccaagcctctgtcagcaaagaaatttcaagcattcgaacaaatggacaaggcttaaaacaatcaaatgggaatgtaaatttaagtaaaacgaatctcgttacttttaaagaatatgtaaatatgtttgaagattatcaatcagctctatctaattatgaaaacataattgaacaagatacgacggctatggatacaacggtaacagaaattgttgaaaacgatagagaaatagcaggacaaattaataaataattaaacaagacgggtgagaaaaatgagtaataagggagaaataagaaggcaaattgctaataaagaaagagaaaaagcaagtaaagaagcacaactaacagatttaaaagaggatttaagaaggttgaaagacgcttcgaaaaaattggatacagcaggagaagattttaacaaaggacagagtagttataacaaagtagaaattagtacttcagattggaaaggagaaagaaggactaaaagtgacagcaaaaagaaagatgtcgattctgaattaaaaaaagttgaacaagactttgatgatgcgaagaaggctattaaaaaagatattcaggataaagaagaagaaatcaagggagtcgaaggagaaatcagtactataaatgcagctatagatgcacttaaatcaaaattataataatagagagggaaatttattatggggtacaaagttgatatgtctgaagtgcacaatatgcaaaagtctattgattcaagcttaagtgcaataaatacaaaggttagcacgcttagcagtagcataaacaaccttataaatactgaaggattcgaatgtcagacagcaagtagtgtcaaaaactatagtaagacatttcatttacaatcaataaaaaagattgaaacaataaacaaagattttaaatcagatattgcgaaatctatacgtaaattccaaagtgaagttgataataatgcttcagctatattggatgaagacgaaataaaaaaatacaaaaaagatattgatgatgcattaaaagatgttttcaaatcttctaaagatgcaaacggagctatttcagatgtttcagatttaacaacagccaaaaaaataaagacagaaaacttggccaataaaatgggagattttaataaagatattgatcaaacggtggaaagattaacgaccttcgacgccaacaattctatagatggtgataagacagataacttaataactgaattaagtggtgtaaattcatatgtcaaaaacatgaagccaaaccgtgcaagaattagttctacaagtggaaaaattgaaggtgcaattgcaaggcataaaacaagtgaagagttagtaagatggcaaacttacatggaaacgttaagtgaaaatctttataaaacaccaggtctaagtaaagcagcttctgacataattacccaagctggacgcgagtactatgctatcaaagctgtagggaatggcagtgctttaagaggatataaagaatatctgaaaacacgagatattaataaattaattaacaaaatgaataaaaaccaattaaaaagaatgtcattggtattaaatacagatagaggtaatattaaaataaaaaatgcagtaaaaatggcaagtgaatttgcccgtaataatccttttaaaaaaggaaatttagtaaattggatgagcaaagtccaagggtatcaaagtgtaagtgctcaaatattaaaaaaggggttgcaagataagaactttaaatatacatttggagatgcaaagaaattttttgatacagctgatatgaaaaaagcagcagtcacagaatttaaaaatacctttgtaccacaaaatataagagaaaccttctttaagaaagaaaatttaacatctaagacagcattaaagaaaaatatgagtaaattctggaatgaagatattaagggtggaatcaaagagtttaaattagactttgctaacaaaaatatcattggtaaactcggcaaattgttgaaactaggaggcaaggctttaaaaccattaggatttattactgcaattactgacaacataggaaagaaatcttggcaagaaaaattagttggtatgggggtagatttaagtgctattggtgcaagtgcagctgcaggtgcagctgttggaacggcaataccattacctgtagtaggaacagttgcaggtgcattagctggagcagcagtgggtatagctttagattataaaataccgtatcttgataagtctgcaacagaattagctaaagatggtattaactcgggtattaacaaagttaaaagtggatttggaaaagtaacttcaggatttaaaacagttttcggataagaaaggggcagacaaatgaaaatacaagagattgtaggaaatataaagagagcttatctgacaccattaataatttttgtgattttgttttcattattttttgatttgataatgtatttttatggaaaccttcaagggaaattgccaatatatttagatgtatttctaatatttgcagcagttgtatttattttaatgtacttccaagagaaaagtggagaagttaaggttgaaaaatcaaacgttattcgttatttaacattaaatgttgtagctgggtattcaatggtactacttgttgcctctatttatgtttttggggtagcaggctatggttttgatgtatttaattactggttaggtattatattaatgctatttgtatcgtggtttgctctatttttgttttataaaaatgaatttgatagtgaaaatccaaataaagcagttaatgttatagcaattattataaagttatctgcttttggaggacttttctatatcagaacagtcgttcctaatactgcagatgaagagaaatttataactctaagtatcttaattaatatagctgttgatttattgctggttagatcatattttaactatgcattatataagagtgtaaaaaaagatatcgaaaacggagtggatgattaatggaagtaggaatgttaattatgccgttttgtgtgaagattacatttgaaattgataaaaatgataattggttaaatgcattagatacagtaaatgaatttttcatggacaaagatatatatccaactggtcctataattttccaaagagaattagcaggtttgggtgaatataaatatacagcatatatagctcttaatgatgaacttcaagatatacctgaattgaacatcaaatatattgattgtttagaggtaggacctacgttatcaactaagtgttttgaagaagaggactttgaaagagcttataaagaaattgaatatgtagctaacgaaaataatattaagatcctaaatcaaccatattatcatgtaatggtagattattttggtggtacggcttttgaaatttatgctcaagtagatttggatgagagtgaagtatatggataaaaatggatactcatatattatgatgaaaaatgtagcttacaaaacttattttgatgtgactatggatgactatgaagatatactaaaagactttacaaatcttgcaatttctaaaggtaaaacaattacagggccattaacctttgcagtcacgcaaatagacttgcaaaaaaggatgaatattgatttatttatttcagttggaaaatgttttaaatcaaatgaagaactatcatatagaacatatttttgtctagataacatgttacatggtcgtatcacttccaacaattttataacagatgaaatagcgttacttgaggatatgaacgaatttgcttctgacaacaatttaacgtttacttcgccttattatcacacaatgagaaaaagttttagcggtgaacaaggttggattgatgtaaaggccaaagtgtatgaaaatgattaattaataatcagtagaggtaatatatgataatttttattttattaacagtttttgcactcttttatatagcgatgattgctagtttatttaaaagtgaaggtttttcaataataggcttaatattggatatagttattttgacaacgttaatattttattattttgtaggtgcgagttttgttgataatgatttaagtaactttttagcattcatgaattttgggtcatttgtgtatatgtactatgcaattaagagcttgtgggtgaagcctaagttagtaaattatataattgcaaaagaaataggcgaatcaaaagatgtcattgaagaacaggaattagatttacagacatcaaagataagaggtatctactttttcattattgcaattgccttgttaataattactaaattaagaatgcaacctgagttacaggcagatgctatatcgatgaatccagtttttatttttataggagttattatcattttaatttggctagtactggatatatatcgtaagaaaaaatacggtatattcttattcaagacgatagtgccattagttgttacgacttggattattatagctactattgtactttcataagaaattttcaataatttttttggttataattgttgatggatattaattaatcgatagaaaaatcttaatgatttttgaaaaaaatgtaaaaagtatatactattaatatcttttttactgtaattataaatagttaaataaattgaaagacaaaataatgagtaggagttaatgagatggaaaaccaaaaacaaggcaatggcttaaaaattgcaacatgggtatttattgtattaacagtagttacaccgctatttggtattggaagtattgtttgtagtattaattacaaaaaatacgatgcagaaaaaggttcgaagttattgaaaattgcaattatcgtaacaataattgtttttgttttaaatttattagcatatttaggtttaagataagtaaaatgaatttgaagaagcattaagcgacatttgggtgttgtttaatgctttttatttaacggaaataagtgtagagaataaattaatagcttaatcaagagatatttcgaacacataggggcgataacatgactttcgaagagaagttaagtcaaatgtacaacgagattgcgaatgagatcagtgggatgataccgatagagtgggaaaaagtatatacaatggcttatatagatgatgaaggtggagaagtgttctactattacacagaacctggaagcaatgaattatactactatactagtgtattaaataaatatgatatatcggaatcagaatttatggactcagcgtatgagttgtataaacaatttcaaaatttaagaaatatatttaaagaagaaggatatgaaccatggacatcatgcgaatttgattttacaaaagaaggtgaattaaaagtttcatttgattatatagattggatcaatacagagtttgatcaattgggccgtcaaaattattatatgtacaaaaaatttggggttataccagaaatggaatatgaaatggaagaagttaaagaaatcgagcaatatattaaagagcaagatgaagctgaacaataggggagataacatgactttcgaagaaaaattaagtgaaatgtacaatgaaattgcgaataaaattagtagcatgataccagtagaatgggaaaaggtatatacaatggcttatatagatgatggaggaggtgaagtattctttaattatactaaaataaacagcgatgaattgaattattacaccgatatacctaaggagtataacatttctgtgcaagtatttgatgatttatggatggatttatatgatttgtttgaggaattaagaaatttatttaaagaagaaggacatgaaccatggacatcatgcgaatttgactttacaagagaaggtaaattaaaagtttcatttgattatatagattggataaattcagaatttggtcaaataggtcgacaaaattactataagtatagaaaatttggaattttaccagaaacggaatatgaaattaataaagttaaagaaatcgaacaatatattaaagagcaagaagaagctgaaatataggggagataacatgactttcgaagaaaaactaaatgaaatgtacaacgagattgcgaatgagattagtgggatgataccagtagagtgggaaaaagtatatacgatagcctatgtaaatgatagaggtggagaggtcatttttaattatactaaaccaggtagcgatgaattgaattattacacgaatatatctagagattataatgtttcggaagaaatatttgatgatttatggatgaatctttattacttgtttaagaatttaaggaatttatttaaaacagaagaacatgaaccatggacatcatgcgaatttgactttacaagagacggaaaattgaatgtatcttttgattatatagattggatcaatacagagtttgatcaattgggccgtgaaaattattatatgtataaaaaaattggggttataccagaaatggaatacgaaatggaagaaattaaagaaatcgagcaatatattaaaagccaagaaagttaattataggaaagaggttaagcaataagatttgtttaatcttagtttgctgcaatttaaaattgctgatatttctaggaagaatcattcgaaattgaaagtgagagtgaactcataagtggttcaataacaaattgtataaaaaatattgatcataatatcgatagacttatcgataaaattaccgagatgcaaaatgaagttaattcattagatagtacattatctgtactagaaaatgcaatggattcaatagctgctgctattgaaaaattaactaattaaaggagcagtaatggaaaaaataaagaaaataaacaaaatatttttatcatttgaagttattccatttgcaatgatgattttactggcgtttctaccagttattgcaggtataattaataatcgtttgcagtatggtagggattttggcgatagagtaagtttttattgttatatttcaattatggttgcatatgcaattaccattttgttagaaattattttttactttattttattgaaaaactatcaatatgatcaaaacaatattgaattagctaatagagtgaaagttacaaaagtactgtcgattttgtatatgattccaggattatatgcgattccattctattttagatttttacatgttcgctcatttagagaaaataaaaaatccggacagccggcctatcacttttgggaattttttataaaacctaatcgaaaaccgatagagttgaaagacttttttattaaaaatagatgattaaggagtaaccgatgaaaagattaattataggaatgttaattataatgatgagtataatcaattatggttgtggcaataatcaaaatgaaaataaatataaaagtcaaattaataaagtaatgaaaattcaacaagaaactcataaagagatggttaaaaagagtaatgaagttaatcctgaatttaataaggataaagtaaatacttatgtatttaatgatggcaaattaattatcataagctataagttatttaaagataaagatcaaatgttttacgcgacttacgagtttaaaaacgacaaaattttttataagagagatattgatcctaaaacatacgtgaaagaacaccaatcagattataaagatattaaagtaaaataatttaaaggagtaggaaaatggaaaaattaatcaaagtgacgtctttaattggaattattattcaaagttttttaacattgttatttttaatatttttaattttatcagcaacaggcattatacagccagaattgaccacaactgttaatggtgaacaaactatacaaagcccagaaactgctcaagcaacattcgtgacaatattcgcaatattatttgttgtttctttagtttcagatttattaggcattatagctatgaaaaagttgtttgtgaataataaagcgagtggtattttgtatattattggtgcagttatcagtgccaatttattaacatttattgtttggttaataagtggggtttctgttttaagatataacaaaataggaaaagaagtgtcatagcatgaaatatacttggtggatactattaacaattgcaggcattttaagtttaacaagtgtttatggatttattttatgtttaggtagctttggaatgttggcactgaatgtcatgtggctatttgtttatacgccgcataaaaattctaaagcacttgaatctatatcaaaaccaacgataattttatcaatcattgggacatatgcagtatttatatttatgtctatcttattttacttcgtaatgaaagctaggtttatggaaattggaataaaactttatggtgaaccttttaagatgtttggaataccaatattcatcatggctatcattttatttacaatcggtacagtattcgtttataaaatacagcaatcaagattaaagcagtagaatatattaatttaaaatgggacgggtttaaaagaaatccgtcctaatgatttatacataatagatgtagctgaatctaaaagacttcaaatactttgaagataaaaagataatgacaatgaatgtaaaatgtgatttttacaatattaaaatataaaaattccaactgaaaatgtaatggtttagaaaggaaatctaaattttaataacgataaatgaaggatagataaacatgagtaacttaaaccagtttgataaatttgtaccttcatttatttgcgttgaaaatcacgattctgtttccattttcgaaaaatagaaacgagtatcgtaaataaaaactctcatggatacaaggcgattatatagtttcaagatgatgaaccaatttaggacgaaatttaaatggatggatatatttagattttactgaattgtaaaaatagaatttcaagttatttgaatgtatttataaatatatcgttattattaaagtagagattaggggagataacatgactttcgaagaaaaactaagtgaaatgtacaatgaaattgcaaatgagatttgtggaatgataccggttgagtgggaaaaagtatatacgatagcctatgtaaatgatagaggtggagaggtcgtttttaattatactaaaccaggtagcgatgaattgaattattacatgaatatatctagagattataatgtttcggaagaaatatttgatgatttatggatggaactttatagatcatttaaaaaattaagaaatatatttaaagaagaaggacatgaaccatggacatcatgcgaatttgattttacaaacgaaggtaaattaaaagtttcatttgattatattgattgaaagaatacagaatttgatcaattgagtcttgaaaattattatatgtacaaaaaatttggggttataccagaaatggaagaaattaaagaaatcgagcaatatattaaagagcaagatgaagctgaaatataggggagataacatgactttcgaagaaaaacaaagtgaaatgtacaataaaattgcaaatgagattagtgggatgataccagtagagtgggaaaaagtatatacgatagcctatgtaaatgatagaggtggagaggtcgtttttaattatactaaaccaggtagtgatgaattgaattattacacgaatatatctagagattataatgtttcggaagaaatatttgatgatttatggatgaatctgtattacttgtttaagaatttaaggaatttatttaaaacagaaggacatgaaccatggacatcatgcgaatttgactttacaagcgaaggtaaattaaacgtatcttttggttatgtcgattggattaaattaagtttaggtccgttagctagagaaaactactatatgtacaaaaaatttggggttataccagaaatggaatatgaaatggaggaggttaaacaaatcgagcaatatattaaagagcaagaagaagctgaaatataggggcgataacatgactttcgaagaaaaactaagtcaaatgtacaatgaaattgcaaatgagattagtgggatgataccagtagagtgggaaaaggtatatacaattgcctacctagatgatgaaggtggagaagtcgtttttaattatactaaaccaggtagcgatgaattgaattattacacggatatatctagagattataatatttcagaaaaaatatttgatgatttatggatgaatctttattacttgtttatgaatttaagggatttatttaaataagaagatttagaaccatggacatcatgtgaatttgactttacaagcgaaggtgatttaaacgtatcttttgattatatagattagattaaattaggttttggcccatcaggaaaggaaaactactatatgtataaaaagtttggtgttttaccagaaatggaatatgaaatggaagaaattcgagcagtagagaagtatgttaaagagcaagagtagcagacatgttataaaaggctgtgcaaaaccaacctcgttttacatttgattcaaagaagaaggtaaaaaataagattatttgcaacttaaaaagtcaattagcttatcggtatccatacatcatggataaataagttcaactaattaacaaatcacgatataaatttaaaattgtcattaattgaaaaggttattgtagtgtattttataaagttgatgtacatcgacttattttttaaaacttatatcaaaaaaatatgagaaaagtatatactattaaaatgttttttactataattataaatagttaaatatttgggtataaaataaatgtgtgggagcaatttttagagatacatagcaatgtaaaggtatcaaatacttattgcataatttattatgatgacataattttcagtagatagttgtaaattaacactgaaatagatgtttatattaagaagactttaatatcataattaatcaaaatcttgcgtcaaacatttaaacgaattttaagttgataacaattggctaaacattgttcaaacatcacaatgataaagcatattatcagtattgtagtgtgtggaaaatgacagccatctaaggagaaaaatgatgaaaagaatattggtagtatttttaatgttagcaattgtattagcaggttgttctaataaaggtgaaaagtatcaaaaaagatattgataaagtgtacaaagaacagaatcaaatgaataaaattgcctcgaaagtacaaaacactattaaaacagacattaaacaagaagacagtaatacacatgtctataaaaatggtaaagtcattgttattggtattcaattgtataaagatcgtgaaaaaatgtattatttcgcatatgaaataaaagatggtaaggcagagattaatagagaaatagacccaattaagtatatgaaagaccataaagcagattatgaagatgaaaatgtagaagtggaaaaaaaataacgtatgctttctttaaaacttttaaccagtttcaaaaaataaatgagctttagcgataataatttttacaataaacacgatataaatttaaatatttatatataagaacacaaacgtaagtttgtaaataataataaaggagtaaggcaatggaaaaatcgatcaaaataatgacaataataggaattgttgttcaaggtttagcaacggtatttagtttactattgatggttttagcagcatcaggtgtaatgactacagatgtgtcaacaacagttaatggtgaggttgacccagttgatgcagaaacagcagcagcaattttcactgtattattcttattcctattcatatttggaatcatttcaattattttaggtgcaatcggtatgtttaaagcatctaaaaacaaaaaaatgagtggaatattgttgattattggagctgtaataagtggtaacataattacatttgctttatggttagtcagtggtattaaactccttactaataacaagcctaaagatgaaataagcgacttatcataaacatcgtatattgaaatttcaagatttcttaagtaattatatttctgttagtttttaataaattaaccaattaaataaattgctctcttagaagtagattttcagtcaataactgcttttaagagagcattttgtatttgataatgctcatagcatcggacaaaaaccattgacgaactttaaaaaaatacgttagacaatgcacttctaaatattaaaggcatcgactaacgcattgttcaaatagagttaattatttttataaaattgatgatgatcattcaagtaagcatagaataaacctataatgagaccgcctccgatatagttaccgataaaagcggcagcaatatttgaaatagcaggaatgaagtgcaatgtatcaacttgataaattaagcctcccataaacaagcaactgttgtaaacgacatgttcataacccataaaggcgaatatggtaacaccgaacatcatgacaaacatttttgcaagtacatcgtcaatttgcatggcgataactaatgaaatattaataaaaaagttggcgaatatcgctttcattaatatacttacaaacccagtagacaacgttttatgttctataactgctgataattgatttaacatatctggcgtcattacatttgaaaaacgcatgaaactaaataaaatagcagcacctaaaatatttcctgcaaagcacaataaaaatattttcaatactctagtcggtttaattactttataatacaggcctacagtaaagtacatgaagttactggttagtagttcggagtttgtaaataaaatgagtactaacgcaaaactgaatgtaatggcgctggccatattcacaatgcctggcggtaaatctggttcgtgtgttgctttaactgataatacgaagaccgtaataatcccgataataaatcctgccatcatcgcgcgtaatagataacgttttaaataaacgctttgtaatatatctttcgttcttatcgtttcgactacgttatttacccagtcgtccccataaaatattttatcccatttaatatgtttctccttcacaatgacatcctcacttttcatttgttaatcagagtatactatgaatcgccttatttgtgaataatttcacaaaattaattttaaaaactaatatttttgaataacagctaggattttttaacaaatcatttattttaaaataattaatagacagacggtatcactgaaaagtcatgaatttcatataaaaaagcctagtaacgatgggtcaatcattactaggcagtgagcatttattaagttgtcgcttgtttcggacgacgtataaatacatcgatgatgaaaccgataatagcaaagagcatgaatggtacaagccaagctaaatcgatatctgctaaaggtaacatcataaaccatttcaaaataacaccgtgtaataagttgaaactatttagtatttgtaaaattgaaataatcaatgtaataacagttgcgagtcgataggcccaactgaatctgaatgtgctaaacatgttagcaaatgatatcagtacaagtgcaatagacacgggatatattaatgtcaacaatggtacagcaatttttaaaatcatttctaaaccaagtgttgtaaataaaaatcctatgatggagaaaacaagtgcgaatattttataagaaaacttaggtacatgtttcttagtaaatgttgcacaagcgttgacgagtcctatacatgttgttaggcatgcaagaataaccgtcattccaaatacgaggttaccgaacgaaccaaatactcgtaatgagttgtacgtcaatatatctgtaccatctttaaagtttcctggagctgttgatgccccaacgtatgcaagtgcaaagtaaatcattccaagtaatatggctgcaataagacctgaaaagcagacatattttaaaattttcatgcgatctgtgaggcctttaaacttatagccattgacaatgactacggaaaaagctaacgcagcaacaagatccattgtaaaatagccttccaaacttcctgaaatgaaaggatgtgttatatatttatccttaggtgcacttagtacagattcagggttgaaaatgacagcaatacttaatagagcgaccattaatagtaataacggtgttaataatttacctaaattatcaacgattttcgatggatttaaactaatccagtaaacgatagcaaaaaagattgctgcgaatataattaaagtccattggttgtgcacaggtaaaatgtgtcttgtaccaatttcgtacgcgacatttgcagcacgtggaataccgtaaaatgctccgatagacatgtaaatcacgacagcaaaaataaacccgaaccatggatgtatacgattgcctacactttcaacaccttcaccataaaatgcaacaacaataacagtaataaaggggagtaatatgcctgtaagagcaaagcctagcataccaatccacatattttgacccgctgtatggccgagcatgggcgggaatattaaatttccggctccaaaaaatagtgaaaataacatgaggcccgaaataataacttgttttttcaatgtaatttccttcctaaaactagatattcataataatttaaaaaatctgaaaaataaaaacgttcttactttatctttaaatgacaatactatgattctattattttataaaaaagattgcaataataacgtcttgctattattggataatgacaattaaagtgtcgtttttatgaattaaaataggtgaaagtaagttggaaatacgttggagcgttgtgatttttatgagaaattgtatgagtgaggactgctatttataaaaggtaaactatggatgagtttatggttgttccaataggtaaacaagagatagcacactgtacacataatgatacgtggatgagtgaatatgactgataggaaggcctagtcactcaaatgaattaaagtttattacgtgataaatcacaaatctctctcatgtgataggtctcccattaaatcatgcttatatgaaatgttcacatatttgttagcttttcaagaaataatattaaatatcttttcatagtatagcaatattaaataaatgcatttataattttaactgtattttaaatattaatcatgaggtgataagatgaataaaatttcaaagtatattgcaatagcatcattatcggtagcggttacagtttcggcaccacaaacgacaaattctacagcgtttgccaaaagttctgctgaagttcaacaaacacaacaagcttctataccagcatcacaaaaggcgaatcttggtaatcaaaatattatggcagtggcttggtatcaaaattcagctgaagcaaaagcattatatttacaaggttataacagtgcaaagactcagttagataaagagattaaaaagaataagggtaaacataagttagctattgctttggatttagatgaaacagttttagataattctccatatcaaggctatgcatcaatacacaataaacctttcccagaaggttggcatgaatgggtacaagctgctaaagctaaacctgtctatggcgcaaaagaattcttgaaatatgctgacaaaaaaggtgtcgatatctactatatttctgatagagataaagaaaaagatttaaaggcaacacaaaagaacttaaaacaacaaggtatccctcaagctaagaagagtcatattttactaaaaggtaaagatgataagagtaaagaatcacgcagacaaatagttcaaaaggatcataaacttgtcatgctatttggagataatttattagactttacagatccaaaagaagctacagctgaatctcgtgaagcattaattgaaaaacataaagacgatttcggtaagaaatatatcattttccctaacccaatgtatggtagttgggaagctacgatttacaacaataactataaagcaagtgacaaagcaaaagataaattacgtaaaaatgctattaagcaattcgatcctaaaacaggcgaaattaaataatatatgaattggacgtctacatgtacttaaaggtatatgtaggcgtttttaaattgatccttaattttaaatgtaccgtacaaaaataatagacaattaattgcattttccataaatttgcttttaatataaaaagttcgggtataatgaaggataagtgtatgtataacattacagagcgcaacacgacgtacgtgcatctaagaatataaacaatgtttaaatcatagtagtagggagagaaatgcatgtttttagcttggaatgaaatacggcgcaacaaattgaagtttggactaattattggtgtgttaacgatgattagttacttgctatttttattatctggattggcgaatggtcttatcaatatgaataaagaaggcattgataagtggcaagcagatgccattgttctaaataaagatgccaatcaaactgtgcaacaatctgtttttaacaagaaagatattgaaaataaatacaagaaacaagctacattgaagcaaacaggagaaatagtttctaatggtcatcaaaaagacaatgtcttagtgttcggtgttgaaaagtcatcatttttagttccgagtttaatagaagggcataaagcgactaaagataatgaagtgttagctgatgaaacacttaaaaataaaggatttaaaattggcgacacattatcactatctcaatcagatgaaaaattgcatatcgtaggttttacagaaagtgcaaaatataatgcgtcaccagtcattttcacgaatgacgctaccattgccaaaatcaatcctagattgactggagataaaattaatgcagttgttgtacgtgatacaaattggaaagacaaaaaattaaaccaagagcttgaagcggtaagtattaatgactttattgaaaatttaccaggttataaaccacagaacttaacattaaactttatgatttcattcttatttgtcatttcagctacagttataggtatattcttatatgtcatgacattacaaaaaacaagtttatttggcatattaaaggctcaaggatttacgaatggctatttagcgaacgtagttatttcacaaacgctcatattagcattatttggtacggcatttggcttactgttaacaggcgttacaggtgcatttttacctgatgcagtacctgtcaaattcgatgtactaacattgctcgtatttgcaattgtgttaatgattgtctctgtattaggaagtttattctccattttaacaattagaaaaatagatccgttaaaggcgattgggtaggaggtgtagcaaatgttgaaatttgaaaatgtaataaagtcatttaaagatgggaatcgtaacattgaagcggttaaagatacaaattttgagataaataaaggtgatattgtagcattagttggaccttctggctctggtaaaagtacatttctaactatggcaggtgctttacaaacaccgacatctgggcacattttaatcaataaccaagatattacgacaatgaagcaaaaagcattggcaaaagttagaatgtctgagataggttttattttacaagctacaaatcttgtaccatttttaacggtaaagcaacaatttacattattgaaaaagaaaaataagaatgttatgtctaatgaagactatcagcaacttatgtcacaattaggtctaacatcattgcttaataagttaccttcagaaatttcaggtggtcagaaacaacgtgtggcgatagccaaagcgttatatacgaatccgtcgattattttagcggatgaacctaccgcggcgttagatactgaaaatgcgattgaagtcattaaaattctacgtgatcaagccaaaaaaagaaagaaagcatgtattattgttacacatgatgaacgacttaaagcatattgtgatcgttcatatcatatgaaagatggcgtccttaatcttgaaaatgaaacagtagaatagttttattaagccggtacatcatgtgccggtatttttatgtttatgtattatttgaataaactttcacattcaattaataataattattatcgaaaattagaaatattccgtgaaatataatattttttgtagtaaaatggcctctaagtattcaatatttaaatatggggattgaatataaaattatcgtaatgggggtcaatggttatggatttattaataggtactttatttttatttttggtcttagtgatttttacattatttacatataaagcacctaatggtatgcgcgccatgggagcattagcaaatgcagcaatcgcaacatttttagtggaagcatttaataaatatgttggtggtgaagtattcggtattaaatttttagaagagctaggagacgctgcgggaggtctaggtggtgtcgctgccgctggattaacagcattagctatcggtgtgtcaccagtatatgcattagttatagcagccgcgtgcggtggtatggatttattaccaggtttctttgcgggttatatgattggatatgtgatgaaatatacagagaaatatgtgccggatggtgtcgacttaattggatcgattgtcatcttagcgccattagctcgtcttattgcagtattattaacgccagtagtgaatagtacattgattcgaattggtgatattatccaaagtagtacgaatacgaatccaattatcatgggtatcattttaggtggtattattacggttgtcggcacagcgccattgagttcaatggcattgacagcattattaggtttaacgggtgtacctatggctattggtgccatggcagcatttagttcggcatttatgaatgggacgctattccatcgcttaaaattaggtgatcgtaagtctacgattgcagtaagtattgaacctttatcacaagcagatattgtatcagccaatccaattccaatctatattacaaatttctttggtggtgcgattgctggtttaattattgctatgtcaggtttaattaacgatgcgacaggtacagctacaccgattgcaggatttttagtaatgtttggatttaatcatccaatgactattgtaatttatggtgtagtaatggcgattgtaggtgcgcttgcaggttatcttggttcaatcgtatttaaaaaatatccaattgttactaagcaagacatgattaatcgaggtgcagttgacgcatagcatcatcatattgaatagtaaaaacaaataaaacatagtaacgtgattcagtcgatgaaaaaatcgataatgagtcacgtttttttatagaaaaatataagacataaaaatgtcataatttatagtcgacaaatatcacgccacataaacacttatcattttcgtaggtgccttttactttatggaatgaacttactttttacgaaattatgcgtattttataaacaaatatcattgatataacggtaaatgtaagcgtttacaacagaaataactgcatgctacgatatttttgtaaattcactgattcaagtattttaagtcaatatgaggagggatgttatgagcgattctgagaaagatattttaaaaagaattaaagataatccgtttatttcacaacgtgaacttgctgaggcaattggattatctagacccagcgtagcaaacattatttcaggattaatacaaaaggaatatgttatgggaaaggcatatgttttaaatgaagattatcctattgtttgtattggcgcagcgaatgtagatcgtaagttttatgtgcataaagatttagttgcagaaacatcaaatcctgtaacgtcaacacgctctattggtggcgtagcaagaaatattgctgagaacttaggtaggcttggcgaaacggtcgcttttttatctgctagtggacaagatagtgaatgggaaatgattaaacgattgtccacaccatttatgaatttggatcatgttcaacaatttgaaaatgcgagtacaggttcatatacagctttaattagtaaagaaggcgacatgacatatggcttagcagatatggaagtgtttgactacattacgcctgaatttttaattaagcgttcacacttattgaaaaaggctaagtgcattattgtcgatttgaatttaggcaaagaggcattaaacttcttatgtgcctataccacgaaacatcaaatcaaattagttatcaccacggtttcttccccaaaaatgaaaaatatgcctgattcattacatgctattgattggattatcacgaataaagatgaaacagaaacatacttaaatttaaaaatagaatctactgatgatttaaaaatagctgctaaacgctggaatgatttaggtgttaaaaatgttattgtgacaaatggcgtgaaagaactcatttatcgaagtggtgaggaagaaatcatcaagtcagttatgccatcaaatagtgtgaaagatgttacaggtgcaggtgattcattctgtgctgcagtagtgtatagctggttaaatgggatgtctactgaagatatattaattgctggtatggttaatgcaaagaaaacgatagaaacgaaatatacagttaggcaaaacctagatcaacagcaactttatcacgatatggaggattataaaaatggcaaatttacaaaagtatattgagtattctcgagaagttcagcaagcacgggagaacaatcaaccgattgtagcattagaatcaacaattatttcgcatggtatgccgtacccacaaaatgttgaaatggtaacaacagtagagcaaattatcaggaataatggtgccattccagcaaccatagccattatagatggcaaaattaaaattggtttagaaagcgaagatttagaaatactggcaactagtaaagacgttgctaaagtatctagaagggatttagcagaagttgttgcgatgaagcgtattggtgctactactgtagcgacgacgatgatatgtgctgcaatggctggtattcaattttttgttactggaggtattgggggtgtccataaaggtgcagaacatacgatggacatttcagcagacttagaagaattgtctaaaacaaatgtcactgttatctgtgcaggtgccaaatcaattttagacttacctaagacgatggaatatttagaaacaaaaggcgttccagttattggatatcaaacgaatgaattgccagcattcttcactcgcgaaagcggtgttaagttaacaagttcggttgaaacgccagaacgacttgctgacattcatttaacaaaacagcagttaaatcttgaaggtggcattgttgttgctaatccaattccatatgagcatgccttatcaaaagcatatattgaggcaatcataaatgaagctgttgttgaagccgaaaatcaaggtattaaaggtaaggacgccacaccgttcttgttagggaaaattgtagaaaaaacgaatggtaaaagtttagcagcaaatataaaacttgttgaaaacaatgcggtgttgggtgctaaaattgctgtcgctgttaataaattattgtaggtgatgatacatgaatattttattcgctatcacagggatagcatttgcactatttgttgcgtttttattcagttatgatcgtaaaaacatagacttcaaaaagacgttaataatgatatttattcaagtgttgattgtgatatttatgatgaacacaacgattggtttaacaatcttaactgcattaggttctttttttgaagggttaataaatgttagtaaagcaggtataaactttgtttttggagatatacaaaataaaaatggctttacattctttttaaatgtgttgctgccattagtgttcatttctgtattaataggcatttttaattatattaaggtattaccatttattatcaaatatgtaggtattgctattaataaaataacgagaatggggcgtttagaaagttactttgctatttcgacagcgatgtttggacagccagaagtgtatttaactataaaagatattataccaaagttgtctagagcaaaattatatacaattgcgacatctggtatgagtgctgttagtatggcaatgttgggttcatatatgcagatgattgagcctaagttcgtagttacagcagtaatgttaaatatttttagtgcgcttatcatcgccagtgtaatcaatccctataaatctgatgatactgatgttgaaattggtaacttaacgaaatccacagaaactaaaacattgaatggaaaaacagggaaacctaagaaagttgcctttttccaaatgattggtgatagtgcgatggatgggtttaaaatcgctgttgtagtagccgtaatgttgttagcatttatttcattaatggaagcaattaatatcatgtttggtagtgttggtttgaactttaaacagcttattggctatgtgtttgcaccaatcgcattcttaatggggattccatggagcgaagctgttccagctggctctttaatggcgaccaaattaattacaaatgagtttgtagcaatgcttgattttaaaaatgtcctgggtgatgtatctgctcgaacacaaggtatcatttcagtttacttagtaagcttcgctaattttggtacggttggtatcatcgtaggttcaattaaaggcattagtgataaacaaggagaaaaagttgcatcctttgcaatgaggctgttacttggttcaactctagcttcaatcatttcaggatcaatcattggcctagtattataaattaatcgaagtatctaaattaaattcatggcaaagctaaaccccatcaccaaggtggcgcaacagcgcatcataacttagtgacggggttttatcataacaatctactttttcgtagccgtttttgaaatgtatgttgatggtttatctttttcaaaaattgttaatcccgttatatcttttttatgttttgaagggacaatgaagctaagtatataagcaaagacaaaagcaactgtaaatgaaatggtagatacatagaaaggtgagttacctttgccaacaccattatagacataagcaaagatgatacccaatattaatccacaaataacaccgaatgtattcgtacgtttagtgaaaataccaactgcaaatacaccagccaatggaacgccgaataatccagttacaaacaagaataaatcccataagtcatttgaattagaagcaattaagtatagtgacattccaaaaccgaaaatacctgcaatgatgataatgaaacgtgcaaagttaacttcgtgtcgttcgctaccttttccgaagaagcgttgcttaatgtcgattgaaatacaagcagatatagaatttaaactagatgaaatggtagactgtgcagctgcgaaaatggctgcaataagtaatcctgctacaaatggtggcatctcagtcaaaatgaaatatggcactacagatgatgtattgaagccttttggtaaaacagcttcatgtgcataaaatgaatacaacattgtacccataccataaaataagggtgctgaaattaaagctaggataccatttgtccataacgatttatttgtttcttttaaactatcagaagcttgataacgctgcacgacgtcttgactcgccgtgtattgatacaaattgttgaaaatatttcctaggaaaataattggaatggcagctgctgcagtattcagtttccaattgtctgcactaattaattttttgtgctcaatcgcatctgcaaagacagtgccaaaaccgcctttaatgttcataacaccaagaatgatgataactaaagcgccgcctaatagaatgacgccttgaatgaaatcactccaaaccacaccttcgaaaccacctaaaaatgtatataaaatacatagtaaaccaacgagtgatgcaacgatataagggttcatgtctgatacagatgtaatcgctaatgttggtaagtagataacgattgctacacgccctagatgataaacgacaaataataatgagccaataacacgaatgctaggtccgaaacgtgcttctagatattcatatgcagatgttacctttaactttttaaagaatggaacatagaaataaatgagtaatggaataattgctacgatagcgatgttacctgcaatatatgaccaatctgttaaaaatgctttctctggtgtagacataaacgtaattgcacttaatgtagtggcataaattgaaaacccaactacccaagatggcaagcgaccacttgcagtaaagaaactattcgtactttggctcgcgcgcttagtaaaataaacgccaatgagtaacatagctagtagatatatgataacggcaacccagtttagtgtgccaaacccaacttctttcatgggcaacatcccctttacaatgtattgattctttgatgtctataaatcgtattttgcaatgagttgatctaatgtttgtcgatgtgcttcgttaaaaggtttgaatggacgtttcggtaatcctgcatcaatgccacggtgacgtagtatttctttcaatgttggataaatccccattgataacactgtttcgatgatgtcgtttgaatcatgttgtagttggtaagcttcttgaatttgaccttgtcttgctaagtcgaagatttttctagcgcggcgaccattaacgttatatgtagaaccaattgcaccatctacgccagaaatcgtagcttgaactaacatttcatcaaagccagataagattaatttgtctgggaatgcttttctaatacgttcgagtaggaagaagtttggcgctgtatatttaacaccaacaattttttcgtgattaaaaagctcgctgaattgttcaatagaaatattcacacctgttaaatctggtattgcataaataatcatattgttctgtgttgcttcgataatatcgaaatagtaatctctaatttcttcaaaagtaaatggatagtagaatggtgttacggcagaaagtgcatcataaccgagttctgtggcatattttccgagttcaatggcttcatttaaatctaacgaacctacttgagcaatcaatttcactttatccccaactgcctctttggcaactttgaaaacttgcttcttctgttctgtatttaataaaaagttttcgcctgagctaccatttacataaagaccgtctaattcttcagtttcaatggcattttgagcaatttgtttaagtccttgttcatttacttgaccattttcatcaaaaggaacgagtaacgctgcatataaaccttttaaatctttgttcattatgaagtccctccaaaaatcatttgataatatagtttacagctataattgtaaacgctatcataaaatgtaacaatatctttttgaaaattgtagtcatatttatgtataattaatgaaaatttttttcaaaatcaatagaaatggagtgagtaaggtgtattacatcgcaatcgatattggaggcactcaaattaaatcggcagttattgataagcaattgaatatgtttgactatcaacaaataccaacgccggacaacaaaagtgagcttattactgacaaagtatatgagattgtaacaggatatatgaagcaatatcatttgatccaacctgtcataggtatttcatcagcaggcgttgttgatgaacaaaaaggcgaaattgtatacgcagggccaaccattccgaattataaaggtactaattttaagcgattattaaaatcactgtctccttatgtcaaagtaaaaaatgatgtaaacgctgcattactaggagaattgaaattacatcaatatcaagcagaacggatcttttgtatgacgcttggtacaggcattggtggtgcgtacaaaaataatcaaggccatattgataatggtgaacttcataaggcaaatgaagttgggtatttattgtatcgtccaactgaaaatacaacgtttgagcaacgtgctgcaacgagtgcattgaaaaagcgcatgattgacggaggatttacgagaagcacacatgtgccagtattgtttgaagcagctgaagaaggtgatgatattgcaaaacaaatattgaatgagtgggcagaagatgtagcagaagggattgcccaaatacaagtcatgtatgatccagggcttatattaattggtggcggtatatctgaacaaggagacaatctcattaaatatatcgagccgaaagttgcacactatttaccaaaagactatgtttatgcaccaatacaaacgactaagagtaaaaatgatgcagcattatatggctgtttgcaatgatggttgaaagaaggagtcattctaaaatagaatttgaaaccgttacgagagatgagagctgttgttagttccacagattatgttatatccatgaccaatctaaactatatcaaccaacagtgtgacacgggcatattaaattgaagaagctgagatattaaaattttagaaaatgtaaaaaatatttggtattgaaattaaaaaagcacctagcaactcgttgggacaatcacgatgattgtctacagttgcaggtggatttgaatatactactagttatttgttgtctaggataatagatttagtatgttgataagtttgactcagattcgtattttctaataaatgatagctcacgatatcgattaaaaagagtgtcgcaatttgtgtgttgataaattgatggtcggtattacgcgattgatccgttgttaaaagtactaaatctgcacaatctgtaagtttactaccttcgaaatttgtgatggcaacgacatatgcaccatgagatttggcgacttccgctgcagaaattaattccgaagtattaccactatttgacatagcaataaacatatccgaatgagatagtagggatgccgatattttcattaaatgtgaatcggtagtaacattaccttttagccccatacgaatcatacgataataaaattcagtcgctgataaaccagagctacctagtccagcaaagagtatatgtcgacttgattgaagtttgtcgataaaggtttggataatgtcgttatcaataaattcaccagtttgttgaatgatttgttgatgatatttatgaattctttgaataattgggctattttcaataactgtctctgtcatttcttgttgaatattaaattttaaatcttggaaattctcataatccagcttatgactaaagcgtgtcatcgttgctggtgatgtaccaatcgcatgggctaaggagttaatcgttgaaaaggcatcgctatagccattttgtcttatataattgacgatgcgtttatcagtttttgtaaataaatgttgataacgttgaacacgattctcaaatttcattgtgtcaccccttcatcttaatgattactattatatatgaaaaatattttcaagatagtaaaaagcattgataaaaattatcttaatgatatattgtaaatgactttacgtgaaaaaacgacttatggagtgaggaataatgttaccacatggattaatagtatcttgtcaggcactaccagatgaaccattgcattcatcttttattatgtcgaaaatggcattagctgcgtatgaaggtggtgctgttggtattcgtgcaaatactaaggaagacattttagcaattaaagaaacggtagatttaccagttattggcattgtgaaacgtgactatgatcactcagatgttttcattacagcaacgtcaaaagaagttgatgaactgatagaaagccaatgtgaagtcattgcattggatgcaacgttacagcaacgtccgaaagaaacgttagacgaattagtatcatatattagaacacatgcaccgaacgttgaaatcatggctgatatcgcgaccgttgaagaagctaaaaatgcggcacgacttggctttgattatattggcacgacgttacatggctatactagttatacgcaaggacaattactttatcaaaatgacttccaatttctaaaagatgtactacaaagtgttgatgcaaaagttattgcggaaggtaatgtcattacaccggatatgtataaacgcgtgatggacttaggcgttcattgttcagtcgttggtggtgcgataacacgaccaaaagaaattacgaaacgttttgttcaaattatggaagattaaatgataacgataaaaaacgagatgaccatcattaattaaaggtacctaattatcttaggtggctgaatgaatgtaatgggttcatctcgttttgtttgtttatgatagtgattttattttcaactttatccaaaaataagtaaagcgacggggatggtgattaatagcgacaatgccacgcgtaaaaaccaaatgatgatgagtttccagacaggtattttaatttcagttgctagtatacatggcactaatgctgagaaaaagataatggctgatacgcttactacaccgacgacaaatttagtactcattgcagctttagttactaacaaagatggtagaaacatttctacaatagaaatcgctgaagcttttgcaagtacagcctgatcagcaattgggaaaatataaataaatggatagaatatgtagccaagccaatcaatgaatggtgtatagttcgctacaatcagccctaaaaaaccaatcgataatatagaaggtaaaataccaacagtcatttctaaaccgtctttcaaattgtcccaaacgttcttcacgagggatggtgttaatgcattttgtttcatcgcctctgcatatgcagttttcagtctgcttccttcaatagcaacttcttgttctccttcttgtccgttataatattctgttgattcattggtgattggcggtagccatgcagtaattgcagtcacgacaaatgtgatgactaaagttatccaaaagtataaattccaatgaggcattaatcctaaagttttagcaatgataatcataaaagttgctgaaactgttgaaaagccagtcgcaataatcgtggcttctcgtttgttgtacatcccttgcttatagacacgattagtaatcaataatcctaaggaataactgccgacaaacgaagccactgcatcgatagcggattttcctggtgttttaaaaataggtctcataataggctccatataaacaccgacaaattctaataagccataacctactaataaagaaagcgcaattgcacctactggaattaagatacttaatggcatcattaatttttcaaacaaaaacggaccatagttagctttaaatagtattgatggaccgaatttaaatacatacattataccgatcattgcacctgcaactttaaataatgtaatgaccaagtttgtgattgaagtcataaaagtacgtctcactattggtaacgctgtaccaattaaaatcataatcagtgcaacatagggcataagtggacctatgattgagcgaatggctagatgaacatgatcgacgaaaatagtgttgttaccattaatcgtaaaaggaataaagaaacatagtatgcccactaaactatagacaaaaaaacgccatgcacttggttgttgtgcattagaatgatattgattcattaaagcaacccctttgtttaaatgaatacacaaaactgtatgatgcatcttccccttaatgagatgaatcattgttttaatttagaaaaatctgaaaacttactataattgtatagtttggattattttcagaccaatacaaattaactaattatatatagattgaaactatatagcttaataaaatatttatcttaaatgttgttgtgttgattcaacgtcacaattaaagtatttataaattatttgaggatacagatatttgtaaataattagtatcgatttaatatcgtattattaaatttttattaattttgtagtcttaatcaaaaaataatatatgtcatgttatattgaaagtgcagttgtttttcattctcaagaggggatcaaaaaaatacttttgaggtgattatatgttaagaggacaagaagaaagaaagtatagtattagaaagtattcaataggcgtggtgtcagtgttagcggctacaatgtttgttgtgacatcacatgaagcacaagcctcggaaaaaataccaacgactaatgcagcggcacaaaaagaaacactaaatcaaccgggagaacaagggaatgcgataacgtcacatcaaatgcagtcaggaaagcaattagacgatatgcataaagagaatggtaaaagtggaacagtgacagaaggtaaagatatgcttcaatcatcgaagcatcaatcaacacaaaatagtaaaataatcagaacgcaaaatgataatcaagtaaagcaagattctgaacgacaaggttctaaacagtcacatcaaaataatgcgactaacaaaactgaacgccaaaatgatcagattcaaaatacccatcatgctgaacgtaatggatcacaatcgacaacgtcacaatcgaatgatgttgataaatcacaaccatccattccggcacaaaaggtaataccaaatcatgataaagcagcaccaacttcaacaacacccccatctaatgataaaactgcacctaaatcaacaaaagaacaagatgcaaccacggacaaacatccaaatcaacaagatacacatcaacccgcgcatcaaatcatagatgcaaagcaagatgataatgttcatcaaagtaatcagaaaccacaagttggcgatttaagtaaacatatcgatggtcaaaattccccggagaaaccgacagataaaaatactgataataaacaactaatcaaagatgcgcttcaagcgcctaaaacacgttcgactacaaatgcagcagcagatgctaaaaaggttcgaccacttaaagcgaatcaagtacaaccacttaacaaatatccagttgtttttgtacatggatttttaggattagtaggcgataatgcacctgctttatacccaaattattggggtgggaataaatataaagttatcgaagaattgagaaagcaaggctataatgtacatcaagcaagtgttagtgcatttggtagcaactatgatcgtgctgtagaactttattattatatcaaaggtggtcgcgtagattatggcgcagcacatgcagctaaatacggacatgaacgctatggtaagacatataaaggaatcatgcctaattgggaacctggtaaaaaggtacatcttgtagggcatagtatgggtggtcaaacaattcgtttaatggaagagtttttaagaaatggtaacaaagaagaaattgcctatcataaagcgcatggtggagaaatatcaccattattcactggtggtcataacaatatggttgcatcaatcacaacattagcaacaccacataatggttcacaagcagctgataagtttggaaatacagaagctgttagaaaaatcatgttcgctttaaatcgatttatgggtaacaagtattcgaatatcgatttaggattaacgcaatggggctttaaacaattaccaaatgagagttacattgactatataaaacgcgttagtaaaagcaaaatttggacatcagacgataatgctgcgtatgatttaacgttaaatggctctgcaaaattgaacaacatgacaagtatgaatccaaatattacgtacacgacttatactggtgtatcatctcatactggtccattaggttatgaaaatcctgatttaggtacatttttcttaatggatacaacgagtagaattattggtcatgatgcaagagaagaatggcgtaaaaatgatggtgtcgtaccagtaatttcgtcattacatccgtccaatcaaccatttgttaatgttacgaatgatgaacctgccacacgaagaggtatctggcaagttaaaccaatcatacaaggatgggatcatgtcgattttatcggtgtagatttcctggatttcaagcgtaaaggtgcagaactcgccaacttctatacaggtattataaatgacttgttgcgtgttgaagcgactgaaagtaaaggaacacaattgaaagcaagttaaattcatattcgtaatttaatatgctatgtattttgtgctactaacatggcacggaagatataagtagcatcacagtgttgaattttaaaatagtaaagtgaaataaagcgcctgtctcattagcgaaaactaaagggacaggcgtatctgtttatgagcttaataaattgtatgaataatatggttgattgaataactgtttatcatgatgataaattgggtttttaaaaataatggtatattacgccgttgttatagcgtttaagaaatcaacaactttacgataaatagtgattgcttcgtcattaggtctacgatcaaaatcatgctcgtttttattcacgcgttcaaatgttgagtgtggcacatgattgtggatgtgttcgctttcttcaacagggacatcataatcgccattacaatgcgcaatgaacaccgggggaagtgttttaagttcatttggtgagatgttgtattttgaatcagtataatcagcaatgttaatcatattgatccactcacctgtaccacgtgcataaccgtagattaaaaaacgttgggcgatttgatcttgaataatcggtgttggtgaagtaagttgagcaagtactgtttcattcacactttgagctattttagcgtaatagctatttgccattttaaacggttcagtattgatgccactataaccataaaaatcaataacaccatcaatatctctgtctcgtgcaattaatagacttaaatatgcacctgatgatctgccaaaggtaaaaatagggcaattagaatattgtgattgaatcgcatcgaatgatgtgaagatgtcatcgatgatgcaatcaaggcttacttctggtaataaacgataacttagttgaattaaatcgtaatgttccgtaaggatatcgatatactgtggcgataaatcattggcctttccaaacattaaaccgccaccatgaatgtagacaatggcaccttttgttggttgatgcttcgctttaataattgtgtagggtaattcaaatgcatctttagtaattactttatctttaatttcagtcacgactatacagactccttatttttgaaattgatgtcattataacattgtcttaaatttctatgaaaaattatcttttgatgatgtgtcatgataattctgttctaattgacgtaaagcgtcacgggtatgcttctttagaccttccccataatccatcattttaacaatatctttaaaagcggcacgcggaatggctaaattttctaaatctgccatagaaaattcaaggtcaatatcatgtggtcgctgttcagaaagtttatgcacaaagtcaggttctgtgacaaaaggcgaagacatgccgaccatatctgcatgttgtaaagcatctaaagcagactctggagaattaatcccgccacttgcaattaaagggatgcgaccagctaaatgttcatagacaatttggttaactggccgaccgaaatgttcacctggtgtacgagacgtattttgataaatatgtcgaccccagctagcgattgctaaatattggatgtttgaaacgtccatgacccaatcgattaattgattgaactcgtcaatggtatatcctaaatcactacctctggtttcttctggcgttgctcgaaatcctaaaataaaattgtcaggtgcttctttatcaatcacttcttgtaccgcacgcataacttctaaacataatcttgcacgattttttaatgagtcggcaccgtaatggtctgtacgtttattcgaaaaagttgagaaaaatgtttgaatcagcaaacgttgtgcaatcgaaatttccacaccatcaaaacctgctttaatcgcgcgtaatgtagcatcgcgatactgctgaatgatgctattgattttctcatgagacatggcgataacatcgtgttcaatcggtgaatgcaacgtcataggacttggtccatacacctttccaaaatttaaaattgcttgatttgaaaaacgaccagcatgcgctagctgaataatagcgaggctaccatgttgtttcatcgtagatgccatgttagttaatccagggatacaagcatcatgatcaatattaaagccgtattcaaacaattgaccataaggttcaatgtaagcagcgccggtgacttgcataccagctgaattagagcgacgtgcagcataagccaagtctgcttttgtaatatagccttcttttgttgatgcgtttacggtcattggtgataatacaaagcgattcgaaattttgatgccattaggtaagtggattgattgtaaaagtggtttgtatcggtacatactatgattccttttctattcaatattgttttcaaagtaccatggaaagaatgaataatcaatgatgaacagtcttgatagaatagaattggtacatggaaagcatttttaaaattaaaattgaactaatgaatgtcatttgtaggtctgaaaatatgaatatgaaaaagaaaaatacaagcgaaaagatataaaagttaattgaaaaacgttatcatatacgtgggtatatgaagagggaatggtattaagaacgttaaaatgttatgtcggtttgatatgacaggataagtttggagatgacggattggttaaattaagcgtattagactatgccttaatagatgaaggtaaggatgcacaaaaggcgttgcaggattcagtgacacttgcaaaattagcagatcgacttggctttaagcgaatttggtttacagaacatcataatgtaccagcgtttgcgtgtagtagtccagaacttttgatgatgcatacattggcgcagacaaatcacatacgagttggttctggtggtgtgatgctgccgcactatcgaccttataaaattgctgagcattttagaatgatggcagcgttatatccaaatcgtattgatttaggtattggtaataatccgggtactactatggtaaagcaagctttagatggaataaatcctacatatgatagttacgatgaatcgatttcgttattacgtgattatcttacaataaaggataagccaagtgcgcatacgttaggtgtccaaccacacattgatcattttccagaaatgtggttattaagtagtagcgaaacatctgccaaaatagctgccgaactaggtatagggctttctgttggaacatttttgctaccagatataaatgcgatacatgcagcgaaggataacattgatatttacaaaaaatatttccaagcatcaacgattaaaatggacgcaaaggtgatggcatctgtatttgtcattgtagctgataacgaagcggaagtagcagcattacaacatgccttagatgtttggttattaggtaaattacaatttgcagaatttgaacattttccatcggtagacactgcgcaaaagtataagctcaatgatcgagacaaagagatgattcaagcacatcaagcacgtatcattgcaggtacacaagaacaggttaaagcacaattagatgatttcattgctacgtttgaagttgatgaggtgttagtagcaccgcttattccaggcattgaacagcgttgtaaaacattaaaattactcgcggaaatctatttgtagcattttaaatagaagagaaaggatgaagataagatgaaaaagttagccaattatttatgggtagaaaaagtaggagatttgtatgtgtttagtatgacacctgaattgcaagatgatattgggacagtaggttatgttgaattcgtgagtccagatgaagttaaagtggatgatgaaattgtgagtatcgaagcatcgaaaacggtcattgatgtgcaaacgccattgtcaggaacgattattgagcgaaatacaaaagcggaagaagaaccgacaattttaaactctgaaaaaccagaagaaaattggttgttcaaattggatgatgtcgataaagaagcattcctggcattaccggaggcttaaatggaaacgttaaaatcaaataaagcgagacttgaatatttaatcaatgatatgcgtcgagagagaaatgacaatgacgtattggtaatgccatcttcatttgaagatttgtgggaattatatcgaggtttagcaaatgtcaggccggcattacctgtaagtgatgaatatttagctgtacaagatgctatgttaagtgatttgaatcgtcaacatgttacggatttgaaagatttgaagccaataaaaggtgacaatatctttgtttggcaaggtgatatcacgacgttaaaaattgatgcaattgttaatgctgcgaatagtcgctttctaggatgtatgcaagctaatcatgactgcattgataatattattcatacaaaagcgggtgttcaagttcgacttgattgtgcagagattattcgacaacaagggcgcaatgaaggtgtaggtaaagccaaaataacacgtggatataatttgccagcaaagtatataattcatacggttggtccgcaaatacgtcgattgcctgtttcaaagttgaatcaggacttgttagctaaatgctatttgagttgtcttaaattggctgatcaacaaagtttaaatcatatagcattttgctgtatatctacaggtgtatttgcttttcctcaagatgaagcagcagaaattgctgttcgaacagtagaaagctatctcaaagaaacaaattcaacattgaaagtcgtgttcaatgtatttacagataaggatttacaactatataaggaggcatttaaccgtgatgcagagtagtaaatggaatgcaatgtctcttttaatggatgacaagacaaagcaggctgaagtattgcgtactgcgattgatgaagcagatgcgatagtgattggaattggtgcaggcatgtctgcatctgacgggtttacatatgtaggagagcgttttacggaaaatttcccagattttattgaaaaatatcgcttctttgatatgttgcaagcgagtttacatccttatggcagttggcaagagtattgggcatttgagagtcgttttattacattaaactatttagatcaacctgtaggtcagtcttatctcgcattaaaatccttagtggaagataaacagtaccatatcataactacgaatgcagacaatgctttcgatgctgctgaatatgatatgacgcatgtatttcatatacaaggcgagtatatactacaacagtgtagtcagcattgtcatgctcaaacgtatcgcaatgatgatttaattcgtaaaatggttgttgcgcaacaagatatgcttataccttgggagatgattccaagatgtcccaaatgtgatgccccaatggaagtgaataaacgtaaagcggaagttggcatggttgaagatgctgaatttcatgcgcaactacaacgttataatgcttttctagagcaacataaagatgataaagtgttgtatttggaaattggaattggttatactacgccacaatttgtgaaacatccttttcagcgtatgacacgtaaaaatgaaaatgccctttatatgacgatgaataaaaaggcatatcgcattccgaattcaattcaagaacgtaccatacatttaactgaggatatctcaacattgattacaacagcactccggaacgatagcacaacgcaaaataacaacattggagagacaaaagatgtacttaatagaaccgattaggaatggagaatatattactgatggtgcgattgcactcgctatgcaagtttatgttaaccagaatatctttttagatgaagatattttattcccttattattgtgatccaaaagtggaaattggacgttttcaaaatactgctatagaagtgaatcaagattatatagataaacacagtattcaagtagttcgccgagatactggtggtggcgctgtgtatgttgataaaggtgccgttaatatgtgttgtattttagaacaagacacttcaatttatggtgattttcaacgattttatcaaccagctataaaggcgttgcatacattaggtgcaagagatgtgatacaaagcggtagaaatgatttaacattgaacggcaaaaaagtgtcaggcgccgcaatgacattaatgaacaatcgtatttatggcggttattcgctattacttgatgttaattatgaagcaatggataaagtgttaaagcctaatcgcaaaaagattgcatcgaaagggattaaatctgtgcgtgcacgtgttggtcatcttagagaagcactggatgaaaagtatagggatataaccattgaagaatttaaaaatttaatggtgacgcagattttgggaatcgatgacattaaagaggcgaaacgatatgaattatctgatgcagattgggaatcgattgaagaattggcgagtaaaaaatataaaaattgggattggaattatgggaagtcacctaaatatgaatataatcgaagtgaaagattatcatcaggtactgtagatattaccatttctgttgaacaaaatcgtattgcagattgtagaatttttggtgatttctttggacaaggtgatataaaagatgtggaacaagcattacaaggaacaaaaatgacaagagaagatttaacgcatcagttaaagcaattagacatcgtttattattttggtaatgttacggttgaatcattggttgagatgattttaagttaatattgtttaggtattaatgtcgcactctcgttgaacatgtgtatttgcttttaaaatggtgactatgtagttatgtgatttgaacatacgattgaaaatgaatttagttaattagcaaagacatcatatttatagcgtttgtgtttattagtgattgggtatttgaaaatggttaatgatagtttttaaaggaataaattcattttcatttatacaagtaagattaaataatagctaccaaagtctatttatatacgtcaaaatataatgactgctataatgaataatcaatagacacaaagaggagattatgtgatgaataataaagtattagtgaccggtggtactggttttgttggcatgcgaattatttcacgattattagaacaaggttatgaggtacaaacgacgatacgtgatttaagtaaagctgataaagtaattaaaacgatgcaagacaatggcatttccacagagcgattaatgtttgtcgaagcggatttatcacaagatgaacattgggatgaagcaatgaaagattgtaaatatgtgttgagtgtggcatctccggtgtttttcggtaaaacagacgatgcagaagtgatggcgaagcctgcaattgaaggtatacaacgtattttaagagctgcacaacatgcgggtgttaaacgtgtggtaatgactgcaaactttggtgcagttggttttagtaataaagataaaaattcaatcacaaatgaaagtcattggacaaatgaagatgaaccaggcttatcagtatatgaaaaatcaaaattgttagctgaaaaagcagcgtgggattttgttgagaatgaaaatacgacagtagaatttgccacaatcaatccagttgcaatttttggaccatcattagatgcacatgtttcaggaagctttcatttattagaaaatttattgaatggttcaatgaaacgtgtacctcaaattccattaaatgttgttgatgtgagagatgtagcagaactacacattttggcaatgaccaatgagcaagccagcggtaaacgatttattgcgacggctgatgggcaaattgatttattggaaattgcaaaattaattaaagaaaaacgacctgaaatagctcaaaaagttgctactaaaaaattgccagactttattttgagtctaggtgctaaatttaatcatcaagctaaagaaggtaaacttttattagatatgaaccgcaatgtaagtaacgaacgtgcaaaaacattacttggttgggaaccgattgcgacacaagaagaagcaattttagcagcaattgatagtatggctaaatttcatttaatataatacaaaaacaccgtccataagtaagtggctttcctcttgataaaaggggcattcactcaatatgtgacggtgttttatatttttacgttaacactattgctgtggcttttgacgaccttttaataaaattgctgttgcacctacgattataataaatagaatcgcaccaaataatcccatatattttactgcgttaccgaacacgataccgacagctaaaaagtctgtatctgagaatgttgttgcagcaccacctaattcgcctaaaaatggcaagaataataatggtaaaaacgttattaggataccatttagagcggcgccagcaacagcacctttaataccgcctcttgcattaccgaatacagcagccgttgcacctaagaagaagtgtgcaactacgccaggtaaaatgacgacgccaccaaataagaataagataaacataccgatgacacctgtaataaagctgacaaagaatccgattagtactgcattttgtgcataagggaacacaatagggcagtctaatgcaggtttagaatttggtacaagcttttctgaaatgcctttaaatgctgggacgatttcagctaagattaagcgaacgcccgttaaaataataaatacaccagcagcaaatgtcacaccttgaattaatgaaaagacaataaagttttgaccatcactaacagattcgtgtacataactaacgcccgcaaataagcatgcgatgaagtaaagtaatgccatcgtaatcgagatactaattgtactttctcgtaagaaacttaagccttttggaaatttaatctcttccgttgatttagacttacctttgaataattgacctacagcacctgcggcaaagtaactgattgagccaaaatgacctaaagctacttggtcattccctgtaatttttcgcatcgtaggttggagtaatgcaggtaatactgccatgattaatcctaatacgagtgcgccgataacaatcgttagccagcctttaatatgactgactgttaaaatgattgctaaaaacgcagccatgtaaaatgtatgatgacctgttaaaaagatatattttaaattagtgaagcgggcaattaaaatattaacaatcatgccacagaccatgatgagtgcagctgttgttccaaaatcttttaaggctagtgagacgatagcttcgttgttaggtacgataccttgcacaccaaatgcgtgttggaatattttgccgaatggttcaagagatcgaacgacgacatcagcacctgcacttaaaattaagaagcctaatatcgttttaatggttcctgaagtgatcgttgcggcaggttttttctgaacgattaaacctataaaggcaatcagtgcaacaagaatggctggttgacttaaaatatcgactataaaattaaggattgcttgcataggtcgaacctcctttaaatcatgttaagttgttgtaatttttctgagagcttttgttgtaattcagctttatctaaaatattatcaagaactaagacatcccctagacgttcggcattttcagctaaatctctaccacaaataaacaagtcagccatctctggacttgctgtcataatgtcactatgttcaacttcgatatcagatggtgcattaagttgcctaagtgcttcttgtgcgttcatttctaccataaaactacttcctaaaccgtggccacatactactaaaattttcatattaatcatgctcctttaaaatgtttttaatgtcttgtgcatttgttgcagttaatagttgctggactgtttggttatcgcccagtacggttgctaaattttgtaatacagataagtgtgaatgattgtcgatggcactcaatacaaaaatgagagatgcgtagtgatcttcatcacaaaatgccacatgttgattcaactttaatagacttaaaccaacttgatgtacgtcattgttcggtcttgcatgtgcaattgcaatttcaggtgcgataacgatataaggtccaagttcattaacgctatcaatcattgcttgaacatagccttgttcaataatttgttcttgtagtaatggctgagaagctatagttatagcttcagtccaatcatttacttgttcttttacaatgatgcgtgttgttgacaaaatgtctaatgacacgttattaagcctcctttgtcatagttaaagcaatgtgttgtttaattttaaaaatattcccatctaagaaatcttgtcgatataagtcgttgcttaagcattcgcttaactgtcccaatgcctttaaatgtgcattggggtggtccgttgctaatgtaattacaaggtgaacgggatcgttagctttactaccaaagataatcccttcagtgaaatatgttagtgcgaaacctacaccattctgtacataatcagtaccagcgtgaataagtgcaatatgtggactaatgaccatatatgacccgaattgttcaaattgttttaaaattgcagctgtataatttgaatagacaatgccatcattgattaaaggttgcacagccactgcaattgcggattcaattgataatggttgtttatttataatgatgcgatgttcaggcaataaatctgcgagtgacttgccatcagttgccattttcatgactcgttgttctcttgagtcattgataatttgattcaatttttgacgagattgttgattgataaatggatcgacatgaataactggtacagctgatatttcacaaggtactgttgaaatgacataatcaatgttatcttgcaataatcgactttcttccaattgataaatggaataggcatcccaaatgtgaaactcaggatacaggtgatttagttttgattttaaaagttgtgacgtgcctataccagaaccacatagtaagacaaccttaatcattgattgtttatgtgttgcaacacgctctatacttgatgcgaagtgaattgtaatgtatgttaattcatcttcgttgaagcgaatagcagcatcttgttcaattggactaatatgcttgctaacggcttcaatgatttgaggatagcgacgcataacttcttgcctcaaaggattaggttgtagcatatcgtatttaatacgatgtatagctggtttgatatgtgtgatcagactggtatgtaacttgttgtcttttgacatatcaatgcctaattcttggctaacacaagtgatcaattcatgtatattttgcgataaatcatggtattcaaaggtaattgaagatgctgtatgttcagtcattttagagcctagtaaatgtaacgtgataaagataatttcagactctggaaatgtgacattacaactgcgttctaagttttctatcatttttgaagcaatagcatactgattagtatgtcgccatttatcaatttcattgataggtatatcgaacgaaaaattttcatttaaacgctgaatggcaatgagtatatgatagattaagccatcgatagccgactgaactaaatgataattttcactatttaatgtcttaataatggcacggcgaaccaatgcgattgattctgaattaaagatatccgcctctataaaaggtgcagcttgtttcatatattgatgtataaagtgtgcatacgctttacgataatgatcttcctcaccaataatattgaatcctttattgtggacataatttaactttaaatggtattgatctagttgggcttgaatcattttaatatcatctgcaattgtccgacgcgaaacattaacatcttgcgcaagttgctttgttgaaacaggatcggttgtttcgaataactttaaagcgatatgtgtgagtcgttcatcttttgaaaaatgaatttgatttgttagattgtgctctaattcatttaatagtgtcgcgtgagctgttgttactttgatgcctgcagctttattacggctgacttggtaatgataagtttcagcatattgctcaatatatgctatatcatattgaatggtacgaggtgatacaccaagttgattagcaatggtattgattggaataaacgtttgctcatgaattaaaagatacaaaatttcgatttgtctataacttaacaacgtaatatcctcctatttgtaattgtaagcgatttcttaaaaacgtagatatgcaatctctttcatattttaatccgaaaaattgcatatcaaaatgtttatggcgcaagattttataggaacttttaaaataaattagatattcatgttgacaatttaaaaatgtcgcagtatatttagttagacatctaacgaaatggtggtgcaataaatggaattcacttattcgtatttatttagaatgattagtcatgagatgaaacaaaaggctgatcaaaagttagagcaatttgatattacaaatgagcaaggtcatacgttaggttatctttatgcacatcaacaagatggactgacacaaaatgatattgctaaagcattacaacgaacaggtccaactgtcagtaatttattaaggaaccttgaacgtaaaaagctgatctatcgctatgtcgatgcacaagatacgagaagaaagaatatagggctgactacctctgggattaaactcgtagaagcattcacttcgatatttgatgaaatggaacaaacactcgtatcgcagttatctgaagaagaaaatgaacaaatgaaagcaaacttaactaaaatgttatctagtttacaataaatgataagtgtgactggtagaaatcagtcactttgtctttaatattatagttagatatctaattgttagtaagctaattattggaaaagacaaggagtattgaacaatgaaagacgaacaattatattattttgagaaatcgccagtatttaaagcgatgatgcatttctcattgccaatgatgatagggactttattaagcgttatttatggcatattaaatatttactttataggatttttagaagatagccacatgatttctgctatctctctaacactgccagtatttgctatcttaatggggttaggtaatttatttggcgttggtgcaggaacttatatttcacgtttattaggtgcgaaagactatagtaagagtaaatttgtaagtagtttctctatttatggtggtattgcactaggacttatcgtgattttagttactttaccattcagtgatcaaatcgcagcaattttaggggcgagaggtgaaacgttagctttaacaagtaattatttgaaagtaatgtttttaagtgcaccttttgtaattttgttcttcatattagaacaatttgcacgtgcaattggggcaccaatggtttctatgattggtatgttagctagtgtaggcttaaatattattttagatccaattttaatttttggttttgatttaaacgttgttggtgcagctttgggtactgcaatcagtaatgttgctgctgctctgttctttatcatttattttatgaaaaatagtgacgttgtgtcagttaatattaaacttgcgaaacctaataaagaaatgctttctgaaatctttaaaatcggtattcctgcatttttaatgagtatcttaatgggattcacaggattagttttaaatttatttttagcacattatggaaacttcgcgattgcaagttatggtatctcatttagacttgtgcaatttccagaacttattatcatgggattatgtgaaggtgttgtaccactaattgcatataactttatggcaaataaaggccgtatgaaagacgttatcaaagcagttatcatgtctatcggcgttatctttgttgtatgtatgagtgctgtatttacaattggacatcatatggtcggactatttactactgatcaagccattgttgagatggcgacatttattttgaaagtaacaatggcatcattattattaaatggtataggtttcttgtttactggtatgcttcaagcgactgggcaaggtcgtggtgctacaattatggccattttacaaggtgcaattatcattccagtattatttattatgaatgctttgtttggactaacaggtgtcatttggtcattattaattgctgagtcactttgtgctttagcagcaatgttaatcgtctatttattacgtgatcgtttgacagttgatacatctgaattaatagaaggttaaatatttcgtccacttctggctgagtatatttcggtcggaagtgtatttttcgaaaaaaataaatatatgatacgattatgaaaaaataaagtgagattggcatatgtgtaaatctaaaatactgttgaaaaatatttttagtgaagaatcagaagttaaagatttaactgaagaaaaatataatcaagattacgaagcattaacatttagctttaaagaggaaacatatcaaagtaggttagctaagaaaacaccgactaaatcgggatatttcgtgacatgttggacaaaagacgaagataattataatcggccatacaaaattgaagagtttgctgattacctgattgttgctgttatcgatgatgaattaaatggctactttctatttcctagggaattattggtagaaaaaggtatcttagcttcatctaagtatcaagggaaaatggcttttagagtttatcctaagtggtgtaatcaattgaataaaacagcagggcaaacacaaaagtggcaatgtaaatatttttttgaatactaataaaaagtcatatggttgaacttataagagatgaatatatcatctttcgataagataaccatatgactttattttttatcatttaatgatgaacggtttcttgtcctactttattccaagtgaggataaagctcaacattgcaaacacactaattgctgttaataaaataaaaccgacatcccatccgaatttatcaactacagcacctaagacgatgttggccattacagcaccaaacagataaccaaataatcctgttaatccagctgctgtgccagctgcttttttaggtacataatctaatgcttgtaaaccaattaacataactggtccatatattaagaaaccaatggcaattaatgagacattgtctaaccaagcattgcctggaggatttaaccaataaattaatacaaatactgtgacacctaacataaagaagaaacctgcaggtccacgacgacctttgaataatttatcagaaatgtaaccacataataatgtaccaggaattccagcccattcgtataagaagtatgcccaacctgatgcttttaagtcgaaatgtttttcttcacttaagtagactggcgcccagtcaagtacaccataacgcacgaaataaacaaatatatttgcaaaggcaattgcccatactcatttattgttcagtacatatttaaataaaatttcttttgtagttaattctgtttctaatgttttcttatcgcttgtagcaaagtcatttttataaatttcgattggaggtaaaccttgagattgaggtgtgtctctaatcaatacgtatgaaattgcggcaatgataagtgctaagagtgcagggtaaatgaatacaccttcgaaaccttttaaataaccaaagttgataaatgcagttgttgtaataccccaagcagcaataggtgccataatacctccaccaacattatgcgcaacgttccaaagggcagtcttacttccgcgttcacttacactaaaccagtgaacgagaacacggcctgaaggtggccagcccataccttgaaaccatccatttaagaataataggacaaacataataccgatacctgatgtaaagaacggtacaaatcccattaacaaattgacgatagcagtgagtgctaatccaagaactaagaatatccgagcattgctccgatcacttacagtacccataaagaacttactaaatccatatgcgatggaaacagcagaaagtgcaaaacctagttccgcttttgtaaaaccttgctcttgcaatgccggcatcgctaacgaaaagtttttacgtaataaatagtacccagcataaccgatgaaaataccaagaaatacttggagacgtaatcgtttataggtatcatctatctgattttctggcaaaggcttaatatgctttgcaggtttaagaaaattcataaaatcctccttaatatgtatttatatgcattttgtgcgataaacttatattagacatgtatgaaagcgttgtcaatatgcttttgtgaaatcttgcatatttagttattgaagtattttataaacatttagaaaaaataaattgctacacataaatttataattatgcaattattatgtcgttatacatactagctgtgtatctacgaatgagtacaaacatatttttatttgcaaggggtaaatggcatataactatcttttttatgtaagctggtataaaatttatactaataggagggatagtatgaatatagtagggcatcatcacatatccatgtatacaaaagatgcaaaacgtaataaggatttttacacaaatgtccttggattacgattagttgaaaagtcggttaatcaagacaatccttcaatgtatcatttgttttatggggacgaagtaggtacagccggaacaattttaagcttttttgaaattcccaatgcgggtcataagcagccaggtactgaaacgatttatcgattttcattattagtaccaaatcaagcggcacttcattattttgaaaaacgtcttgagaataatggtattaagtctgaacgtttgtactatcttggacaagaaggtgttgtctttaaagatgaagacgacttagaaatcatattgcttgttaatgatagttttgaagtaccacatcaatggcaacataacgcttatagtgaaatacctcaagcatatcaaattttaggaatagggccagtcgaattaagagttagaaatgcagcgcgtacggtagaatttttggaaaatgtcttaggttatcgcaaaagagataataaatcattcgatgtgctgacattagcaccacaaggtttatattcggattttgtagttattgagcaacagggacaacgtgaaagacctggacgaggttatatccatcatattgcagttaatacaccacaaatgagtgacttagatgcaatttacaagaaattacaacaacaaccacaaagtaattcaggtataattgatcgctatttctttaaatcattatactatcgccataattcaattatgtatgaatttgcgactgaagcgcctggatttactattgatacacctgttgaacaattaggaagtcaattgaacttgcctgactttttagaagcagaacgtgaacaaattgaaagtaagttacacgaaatataaaggagaatgtttaatggccaaattagaaatgaataaaaatacgcctcttgagtttggtttgtattccttaggtgatcatttattgaatccattgaaaggtgaaaaagttagttatgagcaacgtattaatgaaattattgaagcaagtaaattagcagatgaagcaggtattgatgtttttgcagttggtgaaagtcatcaggagcattttacaacacaggcacatacggttgtgttaggtgcaattgcccaagcgacaaagcatattaaagtttcaagttcttcaacgattattagtgcaacagatcctgtaagagtatttgaagacttcgcgacattagatttgatttctcatggtagagccgaaattgtagctggcagagcatcaagaacaggtatttttgacttgtttggctatgatttaaaagactatgatgaattgtttgaagaaaaattaggtttacttttagagttaaataaaactgagcgtattacttggtctggaaaatatcgtccagaacttagaaatatgaaaatattcccaagaccaatcgataatatattgccaatatggcgtgctgttggtggtccacctgcaagtgctattaaagcgggaaaacaaggtgtgccaatgatgattacaacccttggtggcccagcaatgaactttaaaggttctatagatgcttatcgtcaagcggcaactgaagcaggtttcgatgcttcgcctaagtctttaccagtaagtacagcgagtctgttttatacagctgaaacaactcaggatgctatgagagaattttatccacatttgaatacagggatgtcatttattcgtggtgttggttatccgaaacagcaatttgctaattcgtcagattatcgagaagcgctaatggttggaagcccgcaacaaattattgaaaagatattgtatcaacacgagttgtatggtcatcaacgttttatggcacagcttgattttggcggtgtgccatttgaaaatgttatgaagaatattgagttaattggcaacgacattataccggcgattaaaaagcatttatcaaaataggaggggcgtcatcatgaatattgtattattgtcaggttccacagtaggttctaaaacgagaattgctatggatgatttaaaaaatgaactagaagtcatcaatgagggacatcaaatagagttgatggatttacgagaacttgaattagaatttagcgttggaaagaattatctagatactacaggagatgtatataaattaacgacgtcgttaatgcaggctgatgtgatttttattggttttccaatttttcaagcttccatccctggtgctttgaaaaatgtgtttgatctacttccagtcaatgcgtttcgtgacaaggtaataggacttgtagcgacagcaggttctagtaaacattatttaattcctgaaatgcatttaaaaccaatattgagttacatgaaagcacatacgatgcaaacgtatgtatttattgaagagaaagatttttcaaatcaacaaattgtcaatgatgatgttgtatttcggttaaaagcgttggcacaatccacaatgcgaactgccaaagtacaacaacaagtgtttgaagaagaaaacaaccaatacgacttttaaagtataaaaataagacgctcggcacactaaatttgtaagtgtttgagcgtcttttcatattaactatatagccaatgaacgacgataaaggcaagtgatgacaagcatattgaggtaataatgattgtcataagcggtttaagtgcgcgatttttaagatctttaaatgcaacatttaaccctaaagcaaccatggccattaataagcaaattgttgatacagtatttaaaatatttagcaatgctgacggaatagttacatatgtattcactaaggccataatgacaaatccaattaaaaagtatggaatgcttattcgacccttgctagatgattctgatgaacggaaacgcataattaaaataagtacgatggttaatggaatcagtaagaatactctaccaagtttaccaagaagtgcaattttaagtgcatcactaccaccaaagccaccagctaagacaacgtgtgcaatttcatgaagactaacaccagaccaagcgccataaacatttgtcgtcattgaaaagatagcgtagatagctgtatatataagtgaaaatatcgtaccaatcaatgcgatgataccgatactaatagctgtatccttttcacgtgatttgaatattggagcgactgcggcaatagcagcagcaccacaaacgcctgtgccgacacctagtaataatgcgatgtttttgtcaccatgcaacagtttgttgacaaagagcatcattacaatactgaaaataacgacacctacatcgatggctaatagtttactaccttgaccgataatatcgaatatattgagtttaagtccatataggatgattgcaaatcttaataaatatttagatgaaaacgtaatacctgagctatattgttcaggatatcctctaaagtgacgatatagaatagcgattaatatcgcgatagttaatgcgccaaccttatctaggattggcaatttagctgctaaaaagctaaataatgcgactataaatgttagtgatagcccaatcataaaatgcttatttttcaatgatgccatgagcagtgcctcctttaatagcattttagcactgttttgtcgtatttttaaatataaatttggaatgaataataaagtagtgattaaattaagttgtgtgataggaaacttggacatcaatcaaagtaataggcactacaacgcttattggcggggccccaacaaagaagctgacgaaaagtcagcttacaataatgtgcaagttggggatgggccccaacatagagaaattgggtccgtaatttctacagacaatgcaagttggcggggccccaacatagagaatttcgaaaagaaattctacaagcaatgcaagttggcggggccccaacatagagaatttcgaaaagaaattctacaagcaatgcaagttggggaaggacaacaaatttaagatacaatgcgtaacattaatatgttattataatgataatttacagaattatatgaaaaatgaatgaggatgtgatggtatgtttggaatgaaagtgaatgaacaaataacattaaaaattttagaagctcatgacacagaagcgcttttcaatttagtcaatcgttcaagaaattcacttagggaatggttaccttgggtagatgcaactgagcaaccatcagatacgcgtgcatttattaaaagaggacttttgcaatttgctgatggtaatggatttcagtgtggcatttggtatgaaggaacgctagttggtgtcatcggtttacatgaaattaatcacatgcacagaaaaacttcattagggtactatttagataaagaatttgagggtcatgggattatgacacaagcagttgaggcattgataaagtattgtttcgaagagcttgacttaaaccgaattgagattagtgccgcagttaataatgaaaaaagccgggctattcctgaaaggctgggatttactagagaaggtatgttacgtgacaatgaattactaaatggtatttattcatcgagttacatctatagtttattaaaatcagaatacgaccaaaaatgacaaattagacttacaaaagagtgatgacatttaaaatggcagcgctcttttatttaatttttgaaaataaaaggttgttgacagtattattttataacaatataatgattttgataattattatcaactagatgatgtttatgggaggatgctttaaaacagccgttttaagtgtaatgtattattttagcgtgtagggaatgcgaaaataatatttataagaacacatctatggggataatagaatttctataatgaggtgtcaaaatgaaaaagttaacaacgctattattagcatcaacgttattaattgctgcatgtgggaacgacgatagtaagaaggatgattcaaagacatcgaaaaaagatgatggtgttaaagcagaattaaaacaagcaacaaaagcatatgataaatatactgatgaacagttaaatgaatttttaaaaggtacagaaaaatttgttaaagcgattgaaaataatgatatggcccaagcaaaagcgttatatccaaaagttcgtatgtattatgaacgctctgaaccagttgcagaagcatttggagatttagatcctaaaattgatgcacgtcttgcagatatgaaagaagagaaaaaggaaaaagaatggtcaggatatcataagattgaaaaagcattatacgaagataagaaaattgatgatgtgactaaaaaagatgcacaacaattattgaaagatgcaaaagaattgcatgccaaagctgatacattagatatcacaccaaaattaatgttacaaggttctgttgacctattaaatgaagttgcaacttctaaaatcacaggtgaagaagaaatttattcacatacagatttatatgattttaaagcgaacgttgaaggcgcacaaaaaatttatgacttatttaaacctattttagagaaaaaagataaaaaattaagtgatgatatccaaatgaacttcgataaagtgaatcaattattggataaatataaagataacaacggcggttatgagtcatttgaaaaagtatcgaagaaagaccgtaaagcatttgcggatgctgttaatgcattaggagagccactaagtaaaatggctgtgattactgaatgacaaattatgaacaagttaacgatagtacgcaattttcaagacgtacatttttgaaaatgttaggtattggcggtgccggtgttgcaattggcgcaagtggtgttggtagcatgtggtctttcaaatcaatgttcaatacaccagaagatccggaaaaagatgcgtatgaattttatggtaaagtgcaaccaggcattaccacacccacgcaaaaaacatgcaatttcgttgcgttagatttgaagtcaaaagatagagatgcaattaaggcaatgtttaaaaagtggacggttatggctgatcgtatgatggatggtgatacagttggcaagccgagtaacaatcctttaatgccaccagtagataccggtgaatcgataggattaggtgcaagcaagttaacgattacctttgggattagtaagtctttgatgaagaaaattgggttatctagtaaaattcccgatgcctttaaagatttaccgcattttccgaatgatcagttaatagacgattacagcgatggtgatattatgattcaagcatgctcaaatgattcgcaagtatcctttcatgcggttcataatttagttcgtccatttcgagatattgttaaggtacgttgggcgcaatctggttttatctctgctaaaggtaaggaaacacctagaaatttaatggcatttaaagatggaacaattaatcctaggaagaataatcaacttaaagattatgtgtttattgatgacggatgggcgaaacatggaacttattgcgttgtcagacgtattcaaatacacattgaaacgtgggatcgtactgcgctggaagaacaagaggctacatttggtcggaaacgacatagtggtgcaccgttaacaggtgggaaagagtttgatgaaattgacttaaaagcgaaagatagtcatggcgagtatattattgataaagatgcccatacgaggctagcgaaagaagcaaatacgtcaattttacgtagagcctttaattatgtggatggtacggatgaccgcacaggtaacttcgaaacaggcttactttttattgcttttcaaaaagcgacaaaacaatttatcgatatacaaaataatttaggtagtaatgataaattaaatgaatatattacacatagaggttctgcttcatttttagtattaccaggtgttagtaagggaggataccttggtgaaacattatttgactaaatttgtagcaatgctaataactgctgctatggtgtgtagctttgggttactgaaaagtcaggcagcagaacaacaaagtattagtgatgtatatagtgtgataacggatgcgaaatctgcactttctaataattcgatatcgaatgacaataagcagaaagcaattgagcaagtggtaagtgcagttaagaaattatcgcttgaagataatagtgaaagtaatgctgtcaaatcagatgtgagaaagcttgaagatgcaaaagcgaatgataatcaaaaagatacactttcgcaattaacgaagtcattaattgcttatgaagagaaattggctagtaaagatgcgggttctaaaattaaactattgcaacagcaagtcgatgctaaagatgctgcgatgacaaaagcgattaaagataaaaataaagcggaattagaatctttgaacaatagtttgaatcagatttggacaagtaatgaaacagtgattcgcaattatgacgcaaatcaatatggacaaattgaagtcgcattattacaacttagaattgcaattcataagtcaccattagatacggcaaaagtgtcacatgcttggacaacttttaaatcaaatattgatcatgtcgataaaaaaagtaatacgtctgcaaatgatcaataccatgtatcacaattaaatgatgcgttagagaaggcgattaaagctatcgacgacaatcaattgtcggatgctgatgctgcgcttacacattttatagaaacttggccgtatgttgaaggtcaaattcaaactaaagacggtgctttgtatacgaaaattgaagataaaataccatattatcaaagtgtattagacgaacataataaagcacatgtgaaagatggtttagtagatttaaataaccaaattaaagaggttgttggccatagttatagcttcgtcgatgtgatgattatctttttacgtgaagggctagaagtgttgttaattgtaatgacattgactaccatgacgcgtaatgtaaaagataagaaagggactgcaagtgtgattggtggtgcaattgccggacttgtactgagtattatcttagcaattacgtttgtagaaactttagggaatagtggcattcttcgtgaaagtatggaagcgggattaggtatcgttgcggtcatattaatgtttatcgttggtgtttggatgcacaaacgttcaaatgcaaaacgttggaatgacatgattaaaaatatgtatgctaatgcgattagtaatggtaatttggtattgttagcgacgattggtttaatatctgtgttgcgtgaaggtgtcgaggttatcattttctatatggggatgataggtgagctagcgaccaaagattttattattggtattgctttagctatcgttattttaatcatctttgcattattatttagatttatagttaaattaatacctattttctatatatttagagtgttgtcgatctttatttttattatgggattcaaaatgcttggcgtaagtattcaaaagttacaattattaggtgcgatgccaagacatgttattgaaggattcccaacgattaactggttgggcttttatccaagttatgaaccattgatagcacaaggtgcttatattatggtagttgctatcttaatctttaaatttaaaaaataaaaaacaggccgagtgcctgtttttttgttgctatattggaaatattcggtattgcagtataacgataatcacagcattgattcgtataaggttaatgtgttggcggtttgcctcggcatgtgaacttaacgatgaacatactgaactcaaagagcaatatgagtggcaatgtgagtaatatatttaatgttaaatcgggtggtgcaatgatacttgctaatacaaagcaagcgaaataaatatatttacgataatgtttcaatgatgtggtatctataagaccgaattttgcaagacccataaataatattggtaattgaaatagaagaccaaatgtgaataaccaacgtatgagttcaatcaaatatgctttaaagccaatgacaggcgaaatgtttaaagttaatgataattttaacgcgaattgaatgatcattggaaagccaacataaaatgcaaaagcgacgccagcacagaataataacacgctgaaaaaactatatttataaataaattgacgttcattattatgtaatccaggtgcaatgaatgcccacaattgataaaacatgactggtgaaatgaaacaaaacgcgatgaaaaatataatcatcacgtatatttgtatcatttctgtgaatgaaaatgcatgtaaggacacatgtgcacgggtaatatacgttatgaatggtgtcatccaccaaaatgatgaaacatatacgacgatgaccgtaatgacgaacgacaataaaatttttactaaccgatggcgtagttcgctaaagtgaaccagtaaggtgtggtcagtgctattgctctcgctgttgtttcgattccttactgggtgtatcgtgagactctttatctaaatcttctgttgcagatttaaattcttttaaagtagaaccgatggcacggccaaattgtggtaattttttcggaccaaaaataattaaagcgataatgctaatgacgacaagacttgttgggcctgtgatgcctaaaataaaagtgttagttatcatgataatcaacctcactcataagtagtatatagtatttactttataccgaacgataatgattatcaataaaattttatgaaataattaaaatgttgctataaatatagtttattgagggattaattctgaaataacagcttggtcttgcaagtcgatataagtacaagtgcccgcttgaatatcgatatgccatttataaatgccagcttcagccatttcatcacaaaatgtttcaaaatctgtttgcccttgttgatgtctagttaagacgtcttgaactattgttttgtttgatttttgagcaacaggatgattactttttacagatgacgtaacgatatcatcttctgattgatgtacgtatgttgcagtgccatcttgaatgttgacgatattgtaagtcatccccatatctttaaaagctttgaatagttttggaaagtcaacaccagtaaattgttgatgtgcttgttgaattgcagataatgtaaatgccataatagtctcctttgaatggtttgatttagtgaaaatgcgtgcatcatactaaaattagaatgctgttaattatgcaggaaggtgtaacgaaagtaaacaattatgacttgtaggcgttgaggtgtttgtttcaaaatgtcatacataggtggataatcatattttttggtgtagatttgacaaatatagttgtcaaaaagacgcatatcatttacagtgtaattaaggagttgatgcgatgtgcgtaatcgattgaaagaattacgagcacgagatggcttaaaccaaacgcaacttgctaaacaagcgggcgtttcaagacaaaccatatcgctaattgagcgaaacaattttatgccatcagtattaacggcaataaaaattgcttgcattttcaatgaaacggtggaaactgtttttattattgaggaggatgaggcatgaaaatactaagatatatcggatatcttttactgggtggacttgtagggggtatcataggtggaattttaggtaattttgatggatttggtattgagaacttgacgtttgcgacatataacaatgtcgttgtaatatcgattgttgcgacgattattatcatattggtagaagccattgttttgatgaatcaaagacgtgcattgaagtataagcaacttgtagataaagaggtagatatcgatgcaacagatcaatatgagttgcttgcgaatcgttatgttttaaatggaagtatattaagtattctgcagacagttattgcttttttagtattgcttatttttgtggtagggcacgctgcagcaaatgcaatactattctttttaataccattttttgctagtgctattttcaatacacaatttacactgtttaatagaaggtttgatgacagaataccaaaaattgcagataagaattacactgaaaagcgattggaaatattggatgaaggtgaacgccatatagaattaattgcattatttaaaacatatgcgatcaacttatcaatattgatactagccattgtagtaattgggctttattcaattactactggaattaatcaaagctttagtttgctacttatcattgctattttcatatataacgcctttagttatttattgaagagaagacgtttttattaaaattaaacaaagaggagcatggatatgacaacattgttaaacgtagatagtgtgaacaaacaatacaaagattcggattttaaattgcaagatgcatctttaacgatttctactaatgagacagttggattaattgggaaaaatggctcaggtaaatcgacattaattaatattctagtaggcaatcgacataaagataacggtagtatcacattttttggagaagaacataccgtggatgatgtcgaatataaagaacacataggtgtagtgtttgatgatttgagagtgcctaataaattgactattaaagatattgataaagtatttcaatctatttatatgacttggaatagtcaaaaattctttgatttaatcaaatatttcgagttaccactacaaactaaaattaaaactttttcaagagggatgcgaatgaagatagctttaacgattgcgctttctcatgatgtgaagttattaatcttagatgaagcaactgcaggtatggatgtttctggaagagaagaagtaatggaaatactagaagattttgtcgcacaaggtggaggcatcttaatatcatcgcatatttctgaagatatagaacatttagctgataaattagtgtttatgaaagatggacgaatgattttaactgaacagaaagatatacttttagcacaatatggaattgttacgacagaagataaagatgttgaaattcctaagcatttaatcattgcttctagattgtcaaaggggaaatatcaaattttagttaaagattatgcagaaattgaaaatgcagagcctttaaaacacattgatgacgctacaaaaatcataatgcgaggtgaagtataatgaaaggtatgttcctaagtagtttttatgcaacgagaaagcaaacatatatttattttatagtcgctattatatgttactttacttgatatatgagaatgattttacctagtaaatgagaaaagcaatgtcctatattaaagtacattgctttttctattaacgaatacctatgactaaactatctctagctgtttctacaacttctgtactgattttatctaagccatttatatccataattctatctatctgcgcaaataaacgatgaatcagcctaaaattcccttttgtaattttaataatcgtcgttattgcctcataatcagtaaaatcttcgagttttagatcaaatcctaaatcttgccacttatattctaatatatgatgcgtctcgtctttacttagattatcaaattcatgtgcaaaacctatacgcgaatatagttgaggataacgagatagttttttctctatacctggcataccaataaatatcattgctaaattatgttcatcataaatagctcttaattgctctaaatgttgcactttaaggcgatcaatctcatctactataattaaatcaatatatttaaacatatcactataatgtttactatgatcatgaccatacttatttacgatgtgtaatttttgacccaaatcaatacttgcactaatactatatagatcattacttaatcttgtttgtttttcagccggtgcagtataaaatatcttattcaccgataatatatcatcagtcgttttactagctagatcttcccaccctctatgattaacttgcttttcaatagtattccaatttgtgtaatacctagaagataaagtttttccgacaccaggttgaccatagcagatcccaatatattgatatttgatacaagcatcgcaaaattcagcaaatcgtttatactctttcgtttcaatgaaattctgatttttagtcattacgatacctctttaattttttgacgtttttggtcgtttcttgaggtgagtaaccataacttttttcttccttaattaaatcagtggtgcttggactagcaatgttttgttttaagtgttttcttctctgactacgtgcgtgttgtatctcttttatatcaattgaataatcagctaaatcaggggatattgctgtacaaagaaattcatctctataaaaaacgcgtatttcagccatatcattgggattgtaacgaattaatacatactcacctacataagcagttaggtttgtattactgtatctaaagccttgaaaatgaataccatctgaatgaatttttctagatttaggtatttctaataataataaatcaagttgttctaaactgcttggcatattaggaaaaaaatgattactgttccaccgattgataggagtgctctggatagcactgtgctctttttgattataatcttcaattaaaaagtatcgtaatttttcttcgaaattttgaaaatctattaaatcgctagaagtatcattattgtttatatatccaggaagttgttctaagaaagtttggttaactgtctgaaaaaaccgttctattttcccgcgaccacgagggacaccaacttttgaaaacatcaagttaattttcaaatcaatagcgacttgttccatgtggtgcgaggtaaagtcactcccgtgatctgtgtagaatttttcgggtataccacatactggccaattggtattattcttattccatattgcttggtgtagtgttaatgctgtgttttgagcattaggagcatcaaaacttataaagtagcctgcaattgcacgactatagtcatccataataatggttagccatggtctattgatattacctttttgatctaatatataaatatctagcaaagtatggtcggcttgccatatttcattgggtcttgaggattctcttatttgtattaaatcgtacttattttgatagtatttttcaccttggtgagagaaatcaataacagacttaggcattgctttaataatactataaacttgtttataacttggtttataaaaattattctctatacaataattagcgattttcctatgaatcgtagcaatactatttcttttattcttgagtgcaaggcgtttaatctcgtctattatgttttgttttaatttatgctcacctttatcaactcttgtattatgaattagaccagtaagaccttgttccttatataatttattccacctataaagtgtacttaacgcaatacctttgcttttagaaatgcttgataaagattgcttgcccaagataaaaggttttataatattgtacttttgagtagcttctttacgtttggcttcagaaaaattagttagatacttctccttgtttttcatcttccttttcctccaatttattgaggtaacgataaatcgttgtacgtgaaacttgccactgctctgcaattgtcttaattggcgtgccattatcataaagtgtcttaagtaagtttaaatctttttgatttaatttttcgggtctacctccatagcgtcctctagcacgtgctgcaattcggccagctgaagaacgttctaaaattaaatttcgttcaaattctgcaaacgctgcgaataaatgaaataataattgtcctgtagaacttgatttatccatcgttatattttcttctaaactatggaaacttacacctcgttcgttaagctcattaactaatgtgattaaatcctccatattacgtcctagtctgtcgagtctccaaacaacaatcgtatctcctgatctcgcaaattcaattgctttatctaatccaggtcttttactttttgaaccactaatatggtcgctaaatatcttttcacaaccatatgcgtttaatcggtcctcctgtaaattcagattttgtaatccagttgaaactcttgcataacctattttcaaaatacaaacctcctatatacatatacagtgtaccataacttaatttcaaggtcttttgtgaacatagattttttgttgggtttttgaacacgaaaatatatgtattactcacttatttcggcataaaaagagagtgtacagaaaatggttgttttctgtacactttttttaacacaactgtattaaaatgtgttaacatataactatgccaaaaataattaatcataaagaaaagaaaaacaaatcattcaatacgctttcgactccattgtagaaaaaggagttaagggatctactgtaagacaaattgcgaaattagctgatatgacacctggacagattagatattattttccgaatcattcagagttattaaatgctgtaatgtctacagtagaattaaaagtaaggaggagaattgaagcaatatttaaatctgaaaaccttactacaatagataaagcaaaagcgagtttattaacagtactaccattggataaagagagactagctgatatggaagtttggatggcgtttcgcaatgacatacatgagtatggtcaaagtacacttgatgatgggttagatcaattatgtaatagtattttgacattattaaaaaacgatcatttgctgaagaacaatgtgaatattcatcttaattcgatgaaattacatgcattaattgacggtttagctttacataaattgcttaatccaaacggtgtttcaaacgatgatattcaaatcattgttgatgaagaaatagttagattaacgaaataaaggaggacggcccgtgaattttataatatggcttataattttttgtgaaatagccttttggtttgtaatattacttggtttagtaacaagatatatattaaatcaacaaacattaggtttattctggggctgacccaaaagtagctcctatatgaaaaatagaggtctttccatttagatagtagtggaaagacctctatttatcttttgaaagtgaatacaaaaataaagcacactctgctataatataggtgattaatccatttgagagaggtgctttatcatgtatcaaaattataccataaaccaactttgtttgcctatagatcttgaaattaaattagaagaaaatgattttgctcatgccattgtgcagtttgttgactctattcccgatgaagtctttcttccttattatcaatctatgggtagaccccaatatcatcctcgtatgctactttccattattctttgtgcctatattcaaggggtttattcgggccgccaaatacaaaatatgctgatagatagtattcggatgcgctacttatctcaagagcaattccctaactttcgtactattaatcgttttcgcgttcatccgattatgaacgatattctagatcattcatttgttcaatttcgtgagctactggttcaaagtggcttaatcagtggcagtgctctatacattgatggtacaaaaattgaagcggatgcgaataaatactctttcgtttggaaaaaaagtattttaaagtataaggatagccttgatcaaaaagcccttgaaaactaccaacaaatggtggaaacaaaaatcttacctgagttaatagatgatttaaaggatgaactttctatagaagagattgaaaggattcgtcaatctttggaagaaaaggaaaatcaattaattgaagcgattgaccaaaccgaaacagtagaagaacgaaaattacttcgtaaagaaaaatctgaagttcataagcagaagaagcgattcgatgattttgcccaaagaaaaatgagctacgaagaacaattagtgattatgggtgtacgcaatagtttctcaaagacggatcatgacgctacttttatgcgaatgaaagaagatcacatgcttaatggccaactaaaaccaggttataatattcaacttgcgacagaaaatcaatttgctcttgcttatgattgttatccaaatccaacagatacacgaacatttatcccatttcttgaaaagattgaatcaaaaataggtttaccagaaaatattgtcgcagatgccggttatgcaagtgaagaaaattattgttatgtgttagacgaaacagaatccacccccatcattccgcatcaaggttacttaaaagagaagaaacgcgcccataaacaaaatcagtttcatcgagataattggacttacaacgagttggatgattactatatttgtcccaatcagaaaagagtagtgttctcacattattcacaacgtaaagatagaaatggatttattcgaaacttcaaaatctatgaatgtgaagattgtacaggatgtccattgagagagaaatgtaccaaagcaaaagaaggaaaaaatcgacgtttgaatattaatccaacctgggaatatataaaaataaaagcgaatgaaaagatagaaagcaaagaaacagcctcatactatgcgcagcgaaagatagatgtcgaaacagtttttggaaacattaaacaaaatatgaaatttaaaagattccatgtccgaggagctgaaaaaatttttaaggaaatgggacttgtatttcttgcgcacaattttaggaaattagtaactagagtaaggaaatatgagggaaaaacaatcatacaaaaccaaatatagggggaaaatcctctatatttcatccaaaaaaaacaaaaatcgaagacatctttcacgggtgccttcgattttttggttcaaaagggactaatgggtcagccccctcaaaattaccagagattaagctcagccagatataaggactccagccttactttctacgcaacaacgccacacactccacatgccttgagtgggcaaaaaagatgtcgcaccccactggtatccccttggcggaagcccatatttctgaaacagtcgcctggataggctatttttcattgatttggtgcctgcttttgcgttacaatccaagtaattgtaagcaataaagccttcaaaagcatgttgtcctcttgaaggctttattcggtacaactttaaaattggtttacttatctttatcttcctctctaagatacttaactagccccggataattgcttatccttacagttcggatcaattagaattagccgaaaacggcggcgaagaaacgaaccaccgagaagcaccgccgcattgccgagcttgataccctcattgaacgactgtatgcggaccggaaaaggcgcggttgaccgccttgccctcaaaggcttaggggcatatcaactatatattggggccgagtgccgttactttaacaccgccgctagccatgagcttatgcttcctttaggacactgtcccaacagacactttttaaagtatgctgcactaatccttatttttcacagcatagcgcaatgacagacagccatgttctgcattctctgttccctgcaattccaaattaactttttcagataacagaaggttatcaaatagttgtttttctttattacctacaaaacatggtgatatcacaagactgatttcatcaataagtccgttttctaataatttgttggttaatccaccgccactgtctgtccgcatgtatttacacccatattgctcatgcaggatctgaaaggctttttcatagtccacatgatcatttcctgacacaatatatgggtaatgcctttcctccaaataattcaaatattccttcggagtggcagttgataccagaatgacaatttccttcagatatccaagatttcttaagcaatgaagacttctcaagatacctctgctgtcaggtatgactcctattggtctggggtcctccgggcttgttatgattttctcaaaatcagcctctgtttcagcaggatatttttcaaatgcagtaaaaacagtattggacccaaacagcaccgcatccgaatgaattcccccggcaacctggtagtaaacttccggattatcaaagcctttaatgcggccatcaaggctaatttgtgtgtgcataattatctttggtttcatatttttcaatcctcctttttgatagtagaatatcataatacactgacagctgtatgtcagcaggggatatgaaaccttacaaaaaatacataacagaccaatcgctttctctaaatcaagtttaggcagtgattcgtaatttgtgccaggtgtttacgggttatgcattttaattcatcaggttggactatttcaatgcctgatccatattcaatcagctgcttactcaatatctcaaaggaatctgtctggaattcgatttccattttacttcccaaatcggtttcttcaaggaagccgagagaatacctgttcttgatagaattgtatgtctcccctttttcagctctaagaattacattatatagttttttatatgaaagcatttgttttaatatttgttccaaagagccatcatggctttgacagagctcttcttctatgcaaatgcttttaatccgatccacacgaaaattcctatattcatttcttagcctgcaaaaccgattaagtaccagttctgttcataaaaccccagtgatataggctctatcattctgctttccggttcttgccctcctgatgcaggatattgaattgatattacccttttattgcagattgcagtctgaattgctgcaataacgttatccgccaatgtatttttctgtccagatgtgctgtacacgttaatactgttctccaactcctgtgcatagtttttttcaccatgcttcaaaatagatttgattttatacatagctgaatcaaaatcctttataaatgattcatctccatggcaatttaaaaatttccctgctgtaatcaatgcacccacttccgccgctgtaaacattaccggcggaagtaggaagccctctacaagaaaatatccttttccggcctcagatccaattggtattccggcttcttcaagtgtccggatatctctgtaaactgtccttaagcttatattaaatcgctgtgcaatttctttggcaggaattattttttttgattgcagctgaataagaatagaggttactctgttaatcctgttcaaattttattcctcctctgtgacttccataaaaagtatatcctatgcgttcttaagctagctgctgttagtgcttctcattgcaccctggttataaaagccatactcacaaacctcttcaccaaaactctttacatctctaatatagaactctatctagcgaacttttagaaaagatataaaacatcagagtatggacagttgcggatgtacttcagaaaagattagatgtctaaaaagcttgtagttaaagctttttagacatctaaatctaggtactaaaacaattcatccagtaaaatataatattttattttctcccaatcaggcttgatccccagtaagtcaaaaaatagctcgacatactgttcttccccgatatcctccctgatcgaccggacgcagaaggcaatgtcataccacttgtccgccctgccgcttctcccaagatcaataaagccacttactttgccatctttcacaaagatgttgctgtctcccaggtcgccgtgggaaaagacaagttcctcttcgggcttttccgtctttaaaaaatcatacagctcgcgcggatctttaaatggagtgtcttcttcccagttttcgcaatccacatcggccagatcgttattcagtaagtaatccaattcggctaagcggctgtctaagctattcgtatagggacaatccgatatgtcgatggagtgaaagagcctgatgcactccgcatacagctcgataatcttttcagggctttgttcatcttcatactcttccgagcaaaggacgccatcggcctcactcatgagcagattgctccagccatcatgccgttcaaagtgcaggacctttggaacaggcagctttccttccagccatagcatcatgtccttttcccgttccacatcataggtggtccctttataccggctgtccgtcatttttaaatataggttttcattttctcccaccagcttatataccttagcaggagacattccttccgtatcttttacgcagcggtatttttcgatcagttttttcaattccggtgatattctcattttagccatttattatttccttcctcttttctacagtatttaaagataccccaagaagctaattataacaagacgaactccaattcactgttccttgcattctaaaaccttaaataccagaaaacagctttttcaaagttggcgtataacatagtatcgacggagccgattttgaaaccacaattatgatagaatttacaagctataaggttattgtcctgggtttcaagcattagtccatgcaagtttttatgctttgcccattctatagatatattgataagcgcgctgcctatgccttgccccctgaaatccttacatacggcgatatcttctatataagcgtaccggttccaattttttcgcagtttaacttttccgacgcatttatcgtcttggtagtaaagatatattatcttatcagtattgtcaatatattcaaggcaatctgcctcctcatcctcttcatcctcttcgtcttggtagctttttaaatatggcgcttcatagagtaattctgtaaaggtccaattctcgttttcatacctcggtataatcttacctatcacctcaaatggttcgctgggtttatcgatatctttcaggtgccctgctttcatttctgtaatcactgttcccgcctctcttctatatcagcggcatatgtgctatccaggcagccggttttaccagtgtattttttatacatgtccctggtatattttgttatattcctatcatactccggataggcataatgaagcctttccgccacctcaccggataccgccctgaacaattgatggcatagaaataatgcttcccatatgttttcataggaatccatccggtaggtggacaaaagtttctcccacaaatcctcggatatatacctttcaataaacttatagttcttgcctacacttaatttaaagcctgtttcgatgccgaccttccatgatatcattctcagcagctcatggcgaacaatctgattaaaatgatcaatagcaaataaaatttccttacggcacaatcctttaataacataaggtgttacattccaaaattcattgcagcaatcatcatactcccttgcgcttggctttcttacatgataatctatatcagtcggaactatgtcccttttaattctacaatctttatcaattagaacctttattaatttatcgccctttaggtaattatctaactcttccaagggcaataaggtaagatcaattttattgtaatcatcaaatagcataagataggaaaatcccttttcttcaggtgggaataattccatatcctccggcttttgcatcattattatattcccaaattgattaagccagtcatcattagatataaacggttctatatcacttacaaaatatgtaatatcataatcctgaaattcatctttaggtatattaatatttgcgcgtgacccctcaagggtcacaattcgaatacgttcatcctgttctgctaaagaaagtactaaatccatcatttctttttctgatctcatttacatactcctcgtttattttttctatattattacatcttcttttttgccgatacaatcagcatcattgggcgtcgcatttcatccgccatccccggaatatccatcatgttctctggcggctgtggctccacaatctgatttattataaaactatttgaaagcagtgtatttagatatgtggtcagtgttctatgatattttgtaaccttttcttccaaaaacatagctgtccgtttgccctcataataataattgtccaccgggaaatgcagtatttctcctttttcgttataataccagtcttgtgttccatgagcagtaaaaacaggatgttcaactgtaaaaactaaattgccaccagccttcagcatcctatatatcttttttattaaattctcatagtctgctacataatgaaacgcaagcgaacttagtattacatcaaagctctcctctgggaaatccacatcttctatggcacagcattcatattcaatctgtggaaaatgggtttttccttttgctacttcgagcattttatgagaaatatcaacacctactacagaggaagcaccgttttccatcgcatatatacagtgccatccatagccgcatcctaaatcaagcacacgcttacccttaaaatcaggtagcatctttttcaaagtctcccattctcccgcaccagccagtcctttctgcgagcgactcatttgactgtatttttgaaaaaatatattatcatcatatttgttttctttcatctgaactctcctcgtttaaaaagttatttatctccgatacaatttcattcacttcattataaagcttctcggtcatgtcgtagcattcaaaaagtgagataccgagtacttcaaaaatatgatttaccttctcggtatatttttcaggtttatgttcaaaagtttcaagcagttttatagctttcttttcgttgatacaataagcattattacatgcaaataacacttgatttaaacatgaaactatacgaaaaacatgacccgcaatataatatttatcgtctgttcccgaatttgcttttacaaacattaaagagaaccctgcttcaaacataaaaaagttaactaaacttttctgcaaagcattgggataagtttctgcctgtttttttaattcgcataagctttcattcttagcatatagtattttgctaatcgctaattctcctcgatacattgcactaatataaccatggggatgcccagtctgataattggcagtaacaattccgtgctctgtatctttcattatttgttccacacgtttaatatcacgtaaaattaaatccacatgatacccgtttatgactaaccatccgccgccattaatccaatcaccccatgctccgggaggtacaacaaggttatttctatgctcatcatccagctttgtagcgaattgattaatagtatttatgtcaaatgattctgaattgtaatagatgccgatatctatatccgaatcctctgtatgggtgccccttgcacgtgaaccacctaaaacaataccttctatataagacagagaggataatttctctgctactgatttaataatattatctaccatcaagcatgctccttttatcgattcactgctgtaaaaattccaagccaaatcttttgcttctactcaacatatttataatttttttaatttcacaaaagatagttaaaacttatcaattgtctttttatacctctgctgattagatgaagtcttttcaatagcctttaaattaccattcattttgctaacatggtttaaaaataacgttccaagcagaagtcgatcctttctgggtatcctattccccacatatcccttgaataaatctttaacaagaaaaacttcgccatcatttagattttcagtttctctaatagcttcttccaatagctcatttacatcaatcatgttgtccactccttattaataatggggctgacccattagtcccttttgaaccaaaaaatcgaaggcacccgtgaaagatgtcttcgatttttgtttttttggatgaaatatagaggattttccccctatatttggttttgtatgattgtttttccctcatatttccttactctagttactaatttcctaaaattgtgcgcaagaaatacaagtcccatttccttaaaaattttttcagctcctcggacatggaatcttttaaatttcatattttgtttaatgtttccaaaaactgtttcgacatctatctttcgctgcgcatagtatgaggctgtttctttgctttctatcttttcattcgcttttatttttatatattcccaggttggattaatattcaaacgtcgattttttccttcttttgctttggtacatttctctctcaatggacatcctgtacaatcttcacattcatagattttgaagtttcgaataaatccatttctatctttacgttgtgaataatgtgagaacactactcttttctgattgggacaaatatagtaatcatccaactcgttgtaagtccaattatctcgatgaaactgattttgtttatgggcgcgtttcttctcttttaagtaaccttgatgcggaatgatgggggtggattctgtttcgtctaacacataacaataattttcttcacttgcataaccggcatctgcgacaatattttctggtaaacctatttttgattcaatcttttcaagaaatgggataaatgttcgtgtatctgttggatttggataacaatcataagcaagagcaaattgattttctgtcgcaagttgaatattataacctggttttagttggccattaagcatgtgatcttctttcattcgcataaaagtagcgtcatgatccgtctttgagaaactattgcgtacacccataatcactaattgttcttcgtagctcatttttctttgggcaaaatcatcgaatcgcttcttctgcttatgaacttcagatttttctttacgaagtaattttcgttcttctactgtttcggtttggtcaatcgcttcaattaattgattttccttttcttccaaagattgacgaatcctttcaatctcttctatagaaagttcatcctttaaatcatctattaactcaggtaagatttttgtttccaccatttgttggtagttttcaagggctttttgatcaaggctatccttatactttaaaatactttttttccaaacgaaagagtatttattcgcatccgcttcaatttttgtaccatcaatgtatagagcactgccactgattaagccactttgaaccagtagctcacgaaattgaacaaatgaatgatctagaatatcgttcataatcggatgaacgcgaaaacgattaatagtacgaaagttagggaattgctcttgagataagtagcgcatccgaatactatctatcagcatattttgtatttggcggcccgaataaaccccttgaatataggcacaaagaataatggaaagtagcatacgaggatgatattggggtctacccatagattgataataaggaagaaagacttcatcgggaatagagtcaacaaactgcacaatggcatgagcaaaatcattttcttctaatttaatttcaagatctataggcaaacaaagttggtttatggtataattttgatacatgataaagcacctctctcaaatggattaatcacctatattatagcagagtgtgctttatttttgtattcactttcaaaagataaatagaggtctttccactactatctaaatggaaagacctctatttttcatataggagctacttttgggtcagccctttattcttccttgcacttacgcctattatagatttaatactccttataacaacggttgtagaccttatgaatggtgcaacagctgaaatgccacatgctatagcagcagtttatatttcaatttctcttgtctttggcaaaagcatgataaattgggcagatgatagatttagatattatgtgatgaagcaaggttccaaaccttataaacttgacggtttagcttactctaaaaactatgctaaaagttggttgaaacatttactgtcttacattataggtactgggattttacatttaattgtttatttaattaatgataaaagtcgtacagaagctatggatggtgttattcatatttggacaattgttattattatagacttaattatttgtatttcatattttgtgtggcctccaaaaagaaattaaattatggatataaatggtttagataaaataagtacagaagttgtagaaacagctagagatagtttagttataggtattcgataatagaaaaagcaacgcattttaatatagtgcgttgcttttctcatttattaggtaaaatcattctcatatatcgaataaagtgacaattatagctgcaggatactttgcagtatttaatccgttgatgagttcggcaatggctggggttatgttaatcacacctattactgataatattaaacatgaaaaagactcaagatggatgtattatgtatctactttaccggttaaacgtagtgattatattaagtcatactttgccttttatttaatcttattcggtgcaagtttaatgattggattagttgtgactacgattgtgacccaaagtgtgatgattggtattatgtcaggtttaatgagttttggtatcataggggcatactctatcattttcccattgacatttaaatttggcgctgaaaactccaatgtcattatgatatgtgcatctatactactacttatttctttcgtggtctttttctttatatatggtatggttagtggtgcatctgcattagaatttgaaaaaattagcactgaaggatggctagttgtcatagcatatgcggtcattggtatagttataacgagcgtttcttatatattgtctattaaaatttttaacaaacaagaactataattgtcgattttggtgatgatagtatttgaaataatatttagagcaggtgataaatctttacgattgtcatctgttctttttggtgtggaatgaaatgtgggggataagtataggtgacatatctatattgatttatttgttttgaggtggttatgttgtgtgggaattatttccttttagatagtggggattagaggatatatgttatttataagtatcatttgatgattgtataggctaacgatttcctcggaaatatttaaaaacctcgatcatgtagcataactgaagtttgtcacaaaagtataatttgaagttcgacacttttggattcagttccaatactttgaccgaggtaaatactatttattcatgtttattacgtagacgttgatttttaaaataaatcagcatgatgcagaaggttgcaactgatactgagataatcattacatggtcgtgacctttaaataaaaggctgacaatataagacataacgagtatacctagtgaatatgaaatatacttcgcgtttgtcagttcattatggaaataaggcgtgattaaccataatccaatatagaatattaaaacactgatatacatcatattaatttcaaacaagtcatttagtttattgttattactaaaaacaattgcagcattaatcacacctaaagcgatattgattaatagatgcgtatacgataaacggaaaccgatagatgttaatttatgattaatataattttcagtaatgatccaatatacaccgaaaagactaattaaaatcataaattggaatatataaatgtaactaaaatgatcaatgctaaatgatgacgaagctaaaccaaccagtacctcgccaaagataataattgttagtaacgaaaaacgttctactaaatgcatcatattaacaggtgataatacaagatatttctgaaatggaataagtcctgtcgctgcaatgaatacgcctaaaaatccagggatgtaatggatactttgtggtagtactaatgatagaaatgataaaaatgaaatcacaaaggctacgctcgcaaaagcttgacatgtacgcttatcgccataatctaaccctgtacgtatatgtaataaatactgtaatccgatacttaaatacataattgccacgcataagaagaatgggaagaatgtcttttcaaagtccggatataggctgttagataggaagaccatgatgaacatattaaacatcataaacgagacgtctttgaatgtaacttgaccaaatcgatttgtaaaaaatgtttgatgagaccacattaaccataagaacaaactcatgacgatgtatttgaaaaataaatcagctgaaatggaaccgttttgtgttgttaaaatcacatgtgcaattttttgaatggcatagacgaaaattaaatcaaagaacaactcatggaatcctgcacgcttttcagctaaatgttttggtgttaatgcattaaccataaaattttaactcctttaagatgtgtaattaatttactaagtatactatttattttttctagtgaataggggcagatttggcgatgaagtggaaggagaggtgactgcaaggtaattgcggaattaacaatcatcagcgatttaatatttgactggagacgtcatggtaataaaaaattgatgagaaattgatggtgaaaccagctgtgaatagcgatgcaatgatagatagaatttaattagagtcattacgcgaaatgattaatgataatttgtggtaaatcaaagcataattttgtactatagatgaggatgatagagcatatttaagagggtgaaatgttaaagtgaaaccgtttacgtttccgattgcccaaacaaattacatcattgtataatatgatttgttaaatgcataacaagaatgaaaatgtaacatacgtagcaattggtttcataaattggatgttagtggcgtattggttcattagacgtattagtaataaaattgtatatatcataaggagatgaatatgacatgacgagagtcgtattagcagcagcatacaggacacctattggcgtttttggaggtgcgtttaaagacgtgccagcctatgatttaggtgcgactttaatagaacatattattaaagagacgggtttgaatccaagtgagattgatgaagttatcatcggtaacgtactacaagcaggacaaggacaaaatccagcacgaattgctgctatgaaaggtggcttgccagaaacagtacctgcatttacggtgaataaagtatgtggttctgggttaaagtcgattcaattagcatatcaatctattgtgactggtgaaaatgacatcgtgctagctggcggtatggagaatatgtctcaatcaccaatgcttgtcaacaacagtcgctttggttttaaaatgggacatcaatcaatggttgatagcatggtatatgatggtttaacagatgtatttaatcaatatcatatgggtattactgctgaaaatttagtagagcaatatggtatttcaagagaagaacaagatacatttgctgtaaactcacaacaaaaagcagtacgtgcacagcaaaatggtgaatttgatagtgaaatagttccagtatcgattcctcaacgtaaaggtgaaccaatcgtagtcactaaggatgaaggtgtacgtgaaaatgtatcagtcgaaaaattaagtcgattaagaccagctttcaaaaaagacggtacagttacagcaggtaatgcatcaggaatcaatgatggtgctgcgatgatgttagtcatgtcagaagacaaagctaaagaattaaatatcgaaccattggcagtgcttgatggctttggaagtcatggtgtagatccttctattatgggtattgcaccagttggcgctgtagaaaaggctttgaaacgtagtaaaaaagaattaagcgatattgatgtatttgaattaaatgaagcatttgcagcacaatcattagctgttgatcgtgaattaaaattacctcctgaaaaggtgaatgttaaaggtggcgctattgcattaggacatcctattggtgcatctggtgctagagtattagtgacattattgcatcaactgaatgatgaagttgaaactggtttaacatcattgtgtattggtggcggtcaagctatcgctgcagttgtatcaaagtataaataataagaaaacaggttatcacaacagtattaattacatgttggcataacctgtttttatttgtttatggatttattgggtaatattagtcatttgatggtttaattgcaaatgctctaacagggaacccaggtgcatcttttggtttagggctgatagcgtaaatgatggcgccacgagttggtaattgatctaaattagttaataactcgacttggtatttatcctgaccaagaatataacgttcgccaactaaatcaccattttttacaacgtccacagatgcatcggtatcgaatgtttcatgaccaacagcttcaacacgacgttcttcaattaagtacttcaaagcatctaatccccaacccggtgcatgttgttgtccgttcgcatctttgttttcaaacttttcaatattaggccaacgttttgaccaatcggtacgaagtgcaacaaaagtgccaggttcaatagtaccatgctctttttcccatgcttctatatgcgcacgtgttacgatgaaatcattgttgttcgctacttctgttgaaaagtctaatacaattaacggcaataccaattcttttaaatcaatgtcttctaaataacgtttattctcgacaaagtgaattggtgcatcaatgtgagtaccatattgcgttacaatattccaacgttgcacatagaaaccatgatctttaaccgtgaataaagttgaaacttcgcctttttcaaactcactaaaacgtggtatttccggatcaaatgtatgcgttaaatcaacccaagttgcttgttttaaagtatttaattgttgccataaaggatattgtgtcataaaatcacccgtttttagtttattatatgataaatgctgcgattattcttggcgtttagctttaacagcattcacaagcacagtcaatgcatctttaacttcttcttcttttcgcgtttttaaaccacagtcagggtttacccagaataatgagcggtcgatttgttgtagtgaacgattgattgctgtagtaatttcttcttttgttggaatacgtggactatgaatatcatatacacctagaccaatacctaaatcataattaatatcttcaaagtctttaattaaatcaccatggctacgagatgtttcaattgaaataacatcagcatctaagtcatgaatagcatgaatgatttgaccgaattgagaataacacatatgtgtatggatttgagtttcatcacgaactgaagacgttgcaagtttaaatgataaaacagcatctttaagatattgttcgtgatattcagagcgtaatggtaagccttcacgtaatgcaggttcgtcaacttggataactttgattcctgcagcttcaagtgctaatacttcttcgttgattgctaaagcaatttgatcttgaacgactttacgtggtaaatcaacacgttcaaatgaccagtttagaattgttacaggtccagttaacatacctttaactggtttatctgttaagctttgtgcataaactgtttcatcaacagttaaaggcgctgtccattttacatcaccataaatgattggtggttttacggcacgtgaaccatatgattgcacccaaccgaatttagttactaagaaaccttgtaatttttctccgaagaattcaaccatgtcattacgttcaaattcaccgtgaactaatacatctaagccaatgtcttcttgaattttaatccatcgagcaatttcattttttaagaatgtttcatatgcttcgtctgtaatgcgtttgttcttccaatctgcacggtattttcgaacttctcggctttgtgggaatgatccaatagttgttgttggtaaatccggtaagttcaaacgtttttgttgttgttcaatacgttgcgcgaatggtgattgtcttgaagtacgcacgctttcgaaatcataatctaagtttttgaatgattgattttggaaacgctcataacgtgcttttaatttatcatatttaacactatcgttttgattaaataggcgacgcaatgcatctaattcgtctaatttttcagttgcaaagcttaagccttcgccaacacttgtatctaatgtttcatcatctaaagatactggaacatgtaataatgaagatgatggttgaatgacaagttcattagtgtgtgctaacaatttatcgattaagacttttttagcttcaatgtcacttgcccatacattacgaccatcaataattccagcgtataatgtttttgatttatcaaaatctccagcttcaatttgtttaaggttatagccattatcatggacaaagtctaaacctataccaccaacaggtaaagaacttaagaatttaagatgtgcacgttcaaagtatgtttgaatgactaattttttagcaacaccagctttttcgaaatagtcataagcttcacgtgtaatattttcatagctttcgctgtcgtctgtaactaagattggctcatcaacttgaatgtactcagcacctgcatcaattaatgattcaaacacttctttataaagtggtaataacgttttaactttttcttcaaaagtttggtgaccgccttttgataatttaacaaaagtaatcggaccaacaatgacagggtgagcgttaacgtttaaagattgggcatatttaaagcgatctaataatacattgcgactcactttaggctcaacattgtcccattcaggtacgatgtaatgatagttagtgttaaaccattttataagtgcacttgcaacatggtctttattaccgcgagcaatatcaaataataaatcatcatcaatagttcttccttggaaacgttcagggatgatgttgaataataatgacgtatctaatatatggtcatataaagagaaatcaccaactgggatgctatctaagtgatagtacttttgtaataataaattttctttatgtagatcagttaatgtttgatctaattcttctttagaaatcttctttgcccaataactttcgatggcttttttccattctctttttctacctaatcttgggaatcctaagtttgatgttttaattgttgtcataatattgcctccttgtgagcagtaatagattttgagtatgctgcaagttctaatgaatcttcgacattttgaaacggtgtgataatgtataaaccattaaaatattcatgaacagtatcgattaaatcctttgaaagcttaagacttagttctcgtgttttggctttatcatctttaactgcttcaaattgttgtaaaatttcatctgacatcttgattcctggcacttcattatgcaaaaagagtgcgtttttgtaacttgcgataggcataatgcctatgaaaaatggtttgttcaagtgcttagtggcatggtaaatttcaatgattttctctttgctgtacacgggttgtgttataaaataagacattccgctttctatctttttctctaatcttttgacggcaccatataatttacgaacattagggttaaaggcgccagcgatgttgaagtgtgtacgtttcttcagcgcatcaccgtcagtgttaataccttgattaaatcttagagcgagttcagttaatcctttagaattaacatcatagacattggttgcacctggtaagtgaccaacttttgaaggatcaccagttatggctaatatttcgttaacgccaatgagcgataatccaagtaaatgggactgcaagccgattaagtttcggtctcgacatgtaatatgtacgagtggttcaatattgtaatattgcttaattaagctagcagcagcaatattgctaattctgacagttgccaatgaattatctgcgagtgttaccgcatctacattagctttatcaagtttagcgatattttcaaaaaatctatccgtgtctaaatgtttcggtgtatccaattcgataataacggttggacgttcttgaaccttagatgttaatgattgtctaactttattttgagatggattgaaaagtgctttcgttggtatcggaatcacttttttgtcattaacaggtttaagtgtctgaatagattctttaataaatttgatgtgctctggcgttgtaccacagcaaccaccaattaaacgaacaccttcgcgaattagattttgagcaacttgaccgaaatattgtgcattgtcactatacttaaattcactattttcaatatctaataagctggcatttggataacaagataagaatgcgtgctctggtaattcaatatgtgtgaaagactcttgcatatggtgcgggccatgatgacaattgagtcccacgatgtttgcaccacattgaacgagttgttttaatccttcattgattgcctgaccattaactaagtaatttgtgtttgaagcggttaattgagcaatgattggaatgtcgtatttctttctcgttcgtgaaatgacatttgttaactcttctaggtcgtaatacgtttcgaaaagtagcgcgtcaacgccttcttcaattaaggtgtctatttgaatttcagtatgataaagaatagtttgtaagctgatatcctcttgtttgatacctctaaacccaccaactgtgcctaatatatacgtatctttatttgctgctttttttgcgatgcgaacggcggcttgatgtattgctttaactttatcttcaagaccgaatcgttttaacttttcaaaatttgcaccataagtattggtttgaatgacatcagcaccggcttcaatatatgaacgatggatgcgttcaactttatctggatggctaagattatatgcttctggacaggtgtctaatccttcagagtataaaatggttcctatagcgccatcagctactaaaacattatctttcaattgtgtgaggaattgactcattgaatgcctcctttaatgcgtatttgatgtctgcaatgagttcatcaggatcttcgagaccaacacttaatcggaatagaccgaaagtgataccacgttcttgtctcacttcttcaggtagtgcagcgtgagacattgttgctggatgtgaaaggatcgtttcaacaccgcccagactcactgaaacgagtggtaatgtcagtgcatcgacaaattgttgtgctttagactcatcagctaaacgaaagccaataacggcaccgccatttttagcttgttctaaatgagcagtagtgagtcccggataataaacttctgaaatttcatcttgctttattaaaaatgacacgattttttgagcgttttcgacagattgtttaaatctgattggaaaagtttttaaatgtttagcaagtgtccagctatcctgagcagataacatattgcctgtaccattttgtattaaataaagagcgtcactaattgcctcattattagttatgacagcaccagcaattaaatcgctatgtccacttaaaaattttgtagcactatgaatgacaatatcagcgccaagtaataaaggtgattgacctaacggtgtcataaatgtattgtccacagctaccagtagttcatgcttttcggctattttagaaacagctttgatatcagtaattttaaaacagggattcgatggtgtttcgatataaattaattttgtgtttgattgaatggcaccctcgatttgttcgagctttgtagtatctacggttgtaaattcaatattaaatcgattcaaaatttgctcagtgaggcgaaaagtaccgccatatacatcatcgggtaagatgacatgatcaccagatttgaaagtcaaaagtactgctgaaatagcagcaatacctgatgcaaaagcaaaagcgaattttccctgttctaatcgtgctaacttctcttctaaaagttcacggttagggttgccacttcgtgcataatcatatttaacatcgccaccaagacttgtttgatggaatgttgaagaatcatagagtggtgggttagctgaatgatattccacacctctacgccaatcgaatatcacttctgtctcttttgaaagtgtcatacaatctctccaatctgagctttatctaatgcttggatgatatcgcgttcgatgtcttcataattttcaacacctagtgataagcggattaaatactcatcaatgccacgtttatctttttcagcatctggcatatcaacatgtgtttgggtgtaagggaaggtcactaatgtttcagtacctcctaaactttctgcaaaaatgcaaatgtctaaattttctaataatttagcgacgctataggccttgttaagtcttaaactaagcatgccagtttgcccgctatatagtacttcgtcaattgcttgaagtgactgacattttttagcaagttttctagcgtttgattgcgcacgctcaatgcgtaaatgcaaagttttaagtccacgtaacaacaaataactatctattggtgaaagtgttgcgccagtcatgttgtgaaaatcaaacaactgttgcgcgagtgattcatctttgacggttacgacacctgctagtacatcgttatgtccgccaatatatttcgtggctgaatgtaagactatatcagcaccttctgctagtggtgttgaaagataaggtgttaaaaaagtattgtcgataattgacaataagcctttagctttacaaagttgatagtatggctttacatcaatagcaatcatttgtgggttagatattggttcaatgaataatgcaactgttttatcagtgatttctttttcaacttgttcataatctgtaaaatcaacgtacttaaatttgatatcgtattgttgctcgtaaaattcaaataatctaaatgtgccaccatataaatcgaatgaaactaaaatttcatcatgaggtttaaatagattacatattaattgaatggctgacattccacttgatgtagcgaatgatgcaataccatgctcaagtttggcaaaacaggtttcaaatgttgagcgtgtaggatttttagtacgtgtataatcaaaacctgtcgattgtcctagttttggatgcttgtaggcagtagataaatggattggattcgctatagcaccggttgaatcatcggttaatgtgatttgggctaactgtgtatccttcatattaagaccctcctataagaaaaaataaaaaaagcttccgtccttcgtacccgaatgaatcggataaaaaggacgaaagcttatgtttcgcggtaccacctttatttgttattccatcgctgaaataaccttattcagtacgcattaaaagtaaatatgcttactgaacaattatcacaattaaagtcagtaagtaaggatatagtaatgtgctatcccatacttattaacaaaaaatcgtgcgtaaagaatccagtacgccatttaacatcaatgttaatactgtatcgctataacgggcgaacccgtagacacctcatattggcatcaacactccaaggccattttcaaacacgctttcaaaatcttctctcagctactaaagactctctgtataagcagggtgtgttttactttcctctttattgtgtttacgtttcattaaactgttataagatattaattagcttacagagtaaaaaaagatttgtcaacaattattcagaaaattttgatttaaaagttaatttgtttgtgaaattgtaattggtatcttgaagttgaaaaatgaattattttttaaataaagtgtggttaatggttgtctgactcatttagaatacataaaatatatttaactgttgttatcaaataaaaagtgatgtgagtgaattgtcaaaaagtgaagatcaacgtattactaaaacaaaagatgaacaaattaagcaaatagatatatcggatatcaaaccgaatccgtatcagccccgaaaaactttcgatgaaaatcatttaaatgatttggcagattcaattaagcaatatggaattttgcaaccaattgtgcttagaaaaacagttcaaggttattacattgtagttggtgaaagaaggtttagagcttcgaaaattgctggtctaaaatacgtatcagcgattatcaaagatttaacagatgaagatatgatggaactggcggtcatcgaaaatttacaacgagaagacttaaatgcgattgaagaagcggaaagttatcaacgtttgatgacagatttgaaaattacacaacaagaagtagcgaaacgattgagtaagtcgcgcccgtatatagcgaatatgttgaggttattacatttgccgaaaaagattgctgacatggtaaaagatgggcgactgacaagtgcacatggacgaacgttattggcaattaaagatgaacaacaaatgcttaggttagcgaaacgggttgttaaagaaaagtggagtgtcagatatttagaaaaccatgttaatgaattaaaaaatgtttcgtcaaagtcggaaacagacaaagtagatataactaagcctaaatttataaagcagcaagaacgacagttgcgagaacagtatggtaccaaagtagatatatcaataaaaaaatcggttggtaaaatctcatttgagtttgattcacaagaagattttgtgagaataattgaacaattaaatcgtaggtatggtaaatagttacacaattttatataataactctttgtgcaagtgtaaataaattgtaatcagtgaacatttgattctagatatattgagactttcgtaggttggaagtatataaaaatatgaatacaatattgatatatcatatagaagggagtaacgcttatcatgaatcaagtcatgaatattatttcatctctatttgagccattaacaaaaatagaaacatatgaaaacattgcaactaaaatcgctatgattgttatttatattatcgtagccctcatagttattaaaatactgaataaaatgattgaacagggatttaagattcaaaataaaagtaaaaagagtaacaaaaagcgctctaaaactttaatatctcttgttcaaaatgtagtgaagtatatcgtttggtttatagttattacgacgattttaagtaaatttggcattagtgttgaaggggtaattgccagtgctggtgtcgtaggcttagcagtaggttttggtgctcaaactatagttaaagacgtaattacaggattctttattatatttgaaagccaatttgatgtaggtgattatgttaagataaataacggtggtacaactgtagcagagggaacagttaaatcaattggacttcgttcaacacgaatcaatacaatttcaggagaattaacaattttaccaaatagtagtatgggtgaaataacgaactactcaattacaaatggtacagctatcgttaaaattccagtgtctgtcgaagaaaacattgataatgttgataaaaaactaaacaaactatttacttctttacgtagtaaatattacttatttgttagtgatccggttgttattggtattgatgctattgaagatacaagagtaatattgagaatatctgcagaaacaattccaggtgaaggatttgctggagctcgaattattcgcaaagaagtacaaaaaatgtttttacaagaaggtattaaaacacctcaaccaattatgactgcttataatcatagtgaaaacggtgtttagtagtttataatacatggaggtcatatttaatggcgtcaaaatatggaataaatgatatagtagaaatgaaaaaacaacatgcgtgtggaacaaaccgttttaagattattagaatgggtgcagacataagaattaaatgtgaaaattgtcaaagaagtattatgattccacgtcaaacgtttgataaaaaacttaaaaaaatcatcgaatctcatgatgatacacaaagataggagaatgattaatggctttaacagcaggtatcgttggattgccaaacgttggtaaatcaacattatttaatgcaataacaaaagcaggtgctttagcagcgaactatccattcgctacgattgatcctaatgtagggatagtagaagtgccagatgctagattacttaaattagaagaaatggttcaacctaaaaagacattgccgactacatttgaatttacagatatcgctggtattgtgaaaggtgcttcaaagggagaagggttaggtaataaattcttatcacatattagagaagtagatgcgatttgtcaggtcgttcgtgcatttgatgatgataacgtaactcatgttgctggtcgagtagaccctattgatgatattgaagttattaatatggaattagtactagcggacttagaatctgttgagaaacgtttgcctagaattgaaaaattagcacgtcaaaaagataagactgctgaaatggaagtacgtattttaacaactattaaagaagctttagaaaatggtaaacctgctcgtagtattgactttaatgaagaagatcaaaaatgggtgaatcaagcgcaattactgacttctaaaaaaatgctttatatcgctaatgttggtgaagatgaaattggtgatgatgataatgataaagtaaaagcgattcgtgaatatgcagcgcaagaagactctgaagtgattgttattagtgcaaaaattgaagaagaaattgctacattagatgatgaagataaagaaatgttcttagaagatttaggtatcgaagaaccaggattagatcgattaattagaacaacttatgaattattaggattatcaacatattttactgctggtgtgcaagaagtacgtgcttggacatttaaacaaggtatgactgcacctcaatgtgctggtatcattcatactgattttgaacgtggatttatccgtgccgaagtaacaagttatgacgactatgtacaatatggtggcgaaagtggcgctaaagaagcgggcagacaacgattagaaggtaaagaatatattatgcaagatggcgatatcgttcatttcagatttaatgtataaacgatagagtgaagttaattaaatagtatatatgtagaagaggcggaatcaattgttcgcctcttttaattatgcgtataatttattaaaagaatggaataattttactcgcgttaataatatcttgagtgctgaaaaattgtttgccttcgccagtataagcaggctctaaaacaagattagcctttgcacaataaagccattcaggatgaataccactattaagtatctcttggaattcttgaaaatctttagaccaatcaatatttaaattcattccttaccacctcacaactattatagaacatatgttcgcttttgtgaagtgtatttttaaaaatatcatagaaagtttcaaatgaattaatatcaaaaatgatatgaagagtagtttgaattattattgtaaaaagtaatggcgcatgatataattctttattgtgagtaatgaaaattattccttgcttatctgttttaagattgataagccgtatagaccacaaggaggtgcaaatataaaatgagaacatatgaagttatgtacatcgtacgcccaaacattgaggaagatgctaaaaaagcgttagttgaacgtttcaacggtatcttagctactgaaggtgcagaagttttagaagcaaaagactggggtaaacgtcgcctagcttatgaaatcaatgatttcaaagatggcttctacaacatcgtacgtgttaaatctgataacaacaaagctactgacgaattccaacgtctagctaaaatcagtgacgatatcattcgttacatggttattcgtgaagacgaagacaagtaataattagagggggcgtttaaatgctaaatagagttgtattagtaggtcgtttaacgaaagatccggaatacagaaccactccctcaggtgtgagtgtagcgacattcactcttgcagtaaatcgtacgttcacgaatgctcaaggggagcgcgaagcagattttattaactgtgttgtttttagaagacaagcagataatgtaaataactatttatctaaaggtagtttagctggtgtagatggtcgcttacaatcccgtaattatgaaaatcaagaaggtcgtcgtgtgtttgttactgaagttatgtgtgatagcgttcaattccttgaacctaaaaatgcgcaacaaaatggtggccaacgtcaacaaaatgaattccaagattacggtcaaggattcggtggtcaacaatcaggacaaaacaattcgtacaataattcatcaaacacgaaacaatctgataatccatttgcaaatgcaaacggaccgattgatataagtgatgatgacttaccattctaataaaaattaacgaaattaaagcgaaaaaattatcaaaggaggcacacaatcatggcaggtggaccaagaagaggcggacgtcgtcgtaaaaaagtatgctatttcacagcaaatggtattacacatatcgactacaaagacactgaattattaaaacgttttatctcagaacgcggtaaaattttaccacgtcgtgtaactggtacttcagctaaatatcaacgtatgttgactacagctatcaaacgttctcgtcatatggcattattaccatatgttaaagaagaacaataatatataatttattgtcaaaccccgtaggcataggcttacggggctttttgtgttttggggtatagaaaaagggcaaaaaaggatgatgtgaatgttttgtgttcggaatttgcacaaagatatgtttatattgcaaaaataatatgaatttagatgcataaaaaaagaactacgcattttaaataaaatgcatagctcttctttttcttgcatacgaattaaaataactcgcgagacctataagtctctttcctcactagatagtttatacttttggtctgttgaagtcaataattttatctaaagctataaaaaatcttttgatagctaatgcattattataatagctttcgtttcttttatatcgcttttgaagttggtccaaatcgtgatatcttgcttggataattgcattactacaaacttgattatgtaattctagcgtagcgaaagtatctatgaaattttttattccgaacatgtttctagatatgcctatattattccctttttcaaataaatattgaggtaatctactgtcataatttagatttgctatgatgggttggttatgagctgatttgtttcttatatttttaactaaaggcattaaaatattagcaactctcaattcttcgtcattgtacttcttgtaatagaagttgagaaacgaaacgaattgacctagttgcatgaattcaatgcaaacccatgcgggtggattttgatagtatttattcaacttctcgggtagttgtcctcgtttattcatatgcttgaatatttcgtttttatttttgattttggtttccataacttcttctggtgttcttgaatttgtgtcaaaatttgaattgctatatgatttatcaatacataagaactcatctattattttataaccatcttcttggttattttctgttattagttttaagactagatactttaaactatgttcaatatctaaagttaaatgcaacattgtgtatcttaatttcatatctatagttgctaaatctgataaataagcaaattctatgaaatagccgccattctttttttcgaaattttttcggaaataagctagtttgaagaagtaattattttttctaagaatttcatttgctttttcggtgtcaataatattaaaaaatatattcatctgttttaatttcgctatttgctcatcaaaattgagcataggcttaatttctgctagtgtatcatctttttccaattttaactccccaatcgttcaaatttattcatcatatctttcgccatctgattagtaacatgtgtgtatatttctagattttttttataatctgaatgacctacatgctcttgcattgcttttaagttaattcctaattgagcaagtgtagatatatgcgaatgatgtaatgtatgcgtcgttataggtttcttaatagaactaatatcagcgcccccctttaataatgtggctaattttgttcgagtcgatagggctaccagacgtatttgtgaatatgtactctctatcaataaacttatcattccaagcataagtgttcttagtaagtcgatgctttgggtagtgagccctgtggccttatagctattacttctttcagttgtctcctttactccgaatgctcccgtcttttttcagttatccaattaactttaccgtcgatatctagcgttttatcttcatagtttatatttactctctttattgcaagtagctcaccgatacgcatgtcattagcaatttgaaactgtaccatagcttttaccattttataattacgttttgtcgttggatatttttatacttaattacatagtcgaaacaatccagtaactccttaacttcattatcttctaatgtgttattatgtttagctagtaacgcatcactatagggatatctattttatctattacacatataactttgaattgcttgctattttaaattaacaaattttattctcttagattttgtccaattatgtgtagacgatttatagttattaaattcagagtggtagcaaattaaagttaatcaagagttaagatgaatttaattcatgaacacgtctattatttttataattgtagcaaataaagctttacatcaaggaggtaattaaatatgttcaaaaaatatgactcaaaaaattcaatcgtattaaaatctattctatcgctaggtatcatctatgggggaacatttggaatatatccaaaagcagacgcgtcaacacaaaattcctcaagtgtacaagataaacaattacaaaaagttgaagaagtaccaaataattcagaaaaagctttggttaaaaaactttacgatagatacagcaaggatacaataaatggaaaatctaataaatctaggaattgggtttattcagagagacctttaaatgaaaaccaagttcgtatacatttagaaggaacatacacagttgctggcagagtgtatacacctaagaggaatattactcttaataaagaagttgtcactttaaaagaattggatcatatcataagatttgctcatatttcctatggcttgtatatgggagaacatttgcctaaaggtaacatcgtcataaatacaaaagatggtggtaaatatacattagagtcgcataaagagctacaaaaagatagggaaaatgtaaaaattaatacagccgatataaaaaatgtaactttcaaacttgtgaaaagtgttaatgacattgaacaagtttgaaattaagctaaattagtatatatagtgttttatcgctaatactttgaaagttaggtatctaaaggtgcctagctttctttgttatgattagcaccatcatatagaaaattctttaatgacgtttatgccgaaatctacaaaaataatttctcttttatggttaatcaatatgtttttacattcgacaaccttaaaattaacttctttcaatttcataataaagtctctataaaataacttagtttaaaaacgattcgtatctttcagattcaaataccatcattttctcctaatacttacactttaattacaattatgtaagttgttttcagatacatcctattttatattttgtcagaggtgatcttttgaaaacgattttaaaaacaataacatatcttgtacttactatcattggcgcttatgctgctttattcattttaaaaacaatagactcccatggtataacagatcaatttaacccattagtaaagaaggatgattcttatgttaaaacgacagaggtgtctactagaatggatgatcaactccgaagttatagtcaaagtgtttttaataaagaagggaaagagacgcaattaatgtatactgctacatttgatgttaaaccgcatagatacttgaaaattacacataaaggtcatcatgtagaaacttttgaagaagttgaaaaggaagaagtaccaaagaaagcattagacaaactgagtcgataatagcatgcttatattacatggttcatttataaaaggagtacgaacgaaagtaacgcatgacgattaatttaaaaatatttgtaataattatgaataaaattaaaaacaaggggtaatacaatctatatagcatataagcttttgttatgagtttcaaaaataggaagagagagtgatattatgaaattaaaatcattagcagtgttatcaatgtcagcggtggtgcttactgcatgtggcaatgatactccaaaagatgaaacaaaatcaacagagtcaaatactaatcaagacactaatacaacaaaagatgttattgctttaaaagatgttaaaacaagcccagaagatgctgtgaaaaaagctgaagaaacttacaaaggccaaaagttgaaaggaatttcatttgaaaattctaatggtgaatgggcttataaagtgacgcaacaaaaatctggtgaagagtcagaagtacttgttgctgataaaaataaaaaagtgattaacaaaaagactgaaaaagaagatacaatgaatgaaaatgataactttaaatatagcgatgctatagattacaaaaaagccattaaagaaggacaaaaagaatttgatggtgatattaaagaatggtcacttgaaaaagatgatggcaaacttgtttacaatatcgatttgaaaaaaggtaataaaaaacaagaagttactgttgatgctaagaacggtaaagtattaaagagtgagcaagatcactaaaaagattcgttgcattaacgcttgtaaaatgtcttaattcatattaattaataaaataccctcacaacgtaatgtaatatatccagtatagatttgaaaggatatatgccaaacgtgttgtgagggtttatttgcatctatttatccatgcgaatatcgacttcttctaaatgtttctgatattctttaaccttactttctaaaaacatttcatatggtgcatcaaagaagtcagctaaatgcatggcatctttaaatttaggttcatggtgatgattctcccattcccaaatttgatgtgcttcatatttagtaccatatttctcatttaattgctgtgctaattcgtcaatttctaaattatgtttagttcgtaagttatataaaatatgcatattcattgttcattaacctcgcttcttgatttaaaattcaaagatgctctaataatatgtgtatattctagtcctataacataaaataatcaagctatgaattcggcagaaaaaataatgtaaatgtatatgatattatcggtacagagactttaaataacgatagctacattgaataaaattgatattcaattactacttttaaaaatatttggataaaaataatttgaatttgttttagaattgtaaataaggggtactacttagaataacgcaaaataaatagaaaaaggagactgaaaattatgtttggatttattggaatgttaattgtcggtggcttaattggatgggctgctggtgctattatgggtaaagatatcccaggtggtattttaggcaatattatcgcaggtattattggatcatgggtaggtggcaaactattcggacaatggggtcctgaattaggaagtatttacatcttgccagcattaattggttcaattatcttaattgcaatcgtaacgttaattttaagagctatgcgtaaataataaaaaaattcaattggaaattgaaataaagatggcattcagttgtcatcttttttatttgcgtgaaaatggtcaatatgtattataatatttgaaaatgtagataagataggattaaaaagtaataaattaatatgaggaaattttggaaataaaaaagcgagtatttgacaaataaaaaaaggatgacgttgggttgcgccatccaggagtattatgttcatgaatataaaagactgtgtagtcatttaagaactacacccatatagtaacacatcacttgattaaagacaatactatttttagagtcattaatttaaaatatgaattaattctttttttagaatagaatattaagattgatatcgaattagtagtcaaagtgttatggtagatatgaaatacataaggtaaggagtaatattatgacgatttatttagttagacatggcgaatcaaaatcgaattatgataataaacattttcgatcttatttttgtggacaattagatgtgccgttaacggatactggcacaaaaagtgcagacgatttatgtgattattttaaagagaaacagattaaacatgtatatgtttcagacttattaagaacacagcaaacgtttgaacatatttttccatatgacattgcatcaacgactacccctctattaagagaacgttcacttggcgtatttgagggtgaatataaagatgaaatcagtgcgaatccgaaatatgaaaaatatttcaatgatccaaactttaaagactttcgtcatagtttttcacaaaaagcgcctgaaggagaaagttatgaagatgtatatcaacgcgtagaacattttatgaatcatgttgtcaatgaagatacacaaaaagatgatattgtcattgttgcacatcaagttgtcattcgttgtttgatggtttattttaacaaagtttcaagggcagaagctgtggatttaaaggtagaaaattgcaaaccatatatcattgaatagaagtatagaggttctgaaaaactgtgttttatagcggccttcagaacctttttttcatttggaatttaaggggaatcattcttttcaacagacttaccaccaatggctaatgtgataattgtgcttgtgaacaaaataattgaagttataaatgacgctaatgtaaaaggtgtaaattgtgtgagcgataatatcaatgataaaaagaaccaagagatagcccctagaaattgtaaaatagcagaagaaattctaaaactcatataatcatatatagctaaaacaagtgaaggtaatgcgactaataccattataatgatgttgagggtgaataaatatggctgttcaaaagttactgtgtttggtcctgttggatgcattgctgctaagaacaagcaaacaatcgtcgataaaattgctaaaataataaaagtaattcgaactttcatcatgatcatcctttgtttatagagtcaatataagtatggaatatgttaggtatatagtcaaatgcgtcaactaatgggaattttggcatagatagagaatttaaggcaattaaaaaggcatcaaacagtaatatgctgcttgatgcccaaatgatgactttagctaaattgattagtcacttttaaagataaagaattgtcatgaattaaaactcatgtaatgatgtgttacatttcgcaatgatggctttcagttatttatcgataacatcactcttgatacctttagattttaagaaatctttaattttatcttgttgctttttattaacatcaccggcatattttgttggcacgtcgacaacattgattttattttgcggttgatagctaagcttttcaatatcttcatcaacattggcgattgtactatttaaagctttgaagtaattcatcattaattcaacgggtttcttatattctttaggaatattgttttcagtgacaaatttcttgaaatgcaaatcgtttttaacagctaagttagataagtggctaagtgtttctgcttgtttttcagtcacttttgtttgactgtcaatttgtttatctagtttatgttgcataatatatttgttatcaagtatatcgctatttacagacaaatacttttctatagcttgcttcatctctgcatcactaatatcactatttttcttatctgagttaaagatatcttttgtttctaattttttagcgcttttaggtgcatggatgccagtacttgtatgatgatcttcgttatcagattgatcggacgcgcaacctgtaagaattaatgtcgatgctaaaaatgtacttagtagtaatctctttttcataatgtaatataactccttagtttatctttaattgaaaaaatatgtattcatgtttaatagagtaacattgaattagtttggaatgtcacgatgaccttgcaatgaccatagacgtaaatgattacgtgcatgagttgctttttctatcaataatgcatcattttggacgttgttaaggatagctttatctataaataactgcataattggttgtactaatttagacgtaggtatcgtacgtaaaagcataataatttcgttcacatacttttctttctcaatatcatttttcatattgatttgtttgcgagaggtacatactttaagcattatcgcacatctcgttgtatatattaagtttatcataacatgattttatgtcgggataaaaaaataacagcatcttaacaaatgtaagatactgtcagtgaaatgaatgaaactttagtttctgataatatagtcaaaggcatttaatgctgcatttgcaccagcgcccattgaaatgataatttgtttgttcttctgatctgtgacatcgccagcagcaaatattccaggaacattcgtattattgttacgatcaatcacaatttcaccacgttcgtttaattcaacagcatcgtttaaccatgatgtgtttggaagtaaaccaatttgaacaaagataccatctaagttaagtagatgttcttcgccggtgttcatgtcttcgtaacgtatacctgtaacatggtcttctccgacaacttcagtagttttggcatttgttttgatatcaacatttgataaagaacgtaaacgatcttgtaacacgttgtctgcttttaattcgctagcgaattcgaataatgtaacatgattaacgataccagcaaggtcaattgctgcttcaaccccagagttaccgccaccgataactgctacgtctttattttcaaatagaggtccgtcacagtgagggcagaatgcaacacctttattaatcaattgctcttcacctggaatgtttagcttacgccaacctgcaccagtagcaataatgactgttttactttctaagacagcaccgttttctaacgtaactttaattgcttcgtcagtcttttcgatatctgtagcacgtatacctgtcattgcatcaatgtcatattgatcaatgtgcgctgctaagttagaagaaaattcagaaccagttgtttctttaacagtaatgaagttctcaataccagcagtatcattaacttggccaccgatacgatcagcaactataccagtacgtaaacctttacgtgctgtgtaaatcgctgcactaccactagcaggaccaccaccaacgattaagacatcataaggttctttattttcaaactcagatgcatctgccgtactgcctagtttcgaaagaatatcttggattgtcatacgaccattgccaaattcttcgccatttaaaaagacagcagggactgccatgatgttttcagattcttcacggaacactgcaccatcaatcatagaatgcgtgatgttagggttgatcacactcattaagttaagtgcttgaacgacatcaggacatttttgacacgttaaactaatgaatgtttcaaaatggaatgaaccttctaattttttaatttggtcaatgattgactgtttttctttaggtgcacgaccactaacctgtaaaattgctaaaacaagtgagttaaactcgtgacctaatggaatacctgcaaatgttacacctgtttcttcgccaggacgattgactgagaaacttggtgtacgttttaaagatttttcagaaagagatagtctaggtgacatatcagtaatttctgtcaacaaatctttaagttctttggatttatcatctgaaccaaggctggcaacgaattcaacgttgccctccattagttctaatagttgtttaagttgttgttttaaatcagcattaagcatggttgtaatgcctccttagattttacctactaaatctaaaccaggttgcaatgttttagcgccttcttcccatttagctgggcatacttcgccagggtttttacgaacatattgagctgctttgattttgtgagctaatgtactagcgtcacggccaattccgtcagcgttaatttcagatgcttgtacaacaccgtctgggtcgataatgaatgtaccacgttgagctaaaccagtagcttcatctaatacatcaaaattacgagtgattgtttgtgatgggtcaccaatcatagtgtaagtgattttgctaattgcatctgaatggtcatgccatgctttgtgtacgaagtgagtatcagttgatactgagaatacatttacgcctaatttttgtaattcttcatattggttttgtaagtcttctaattcagttggacaaacgaatgagaagtcagcaggatagaagcatactacgctccaagaaccttttaaatcttcttgtgtaacttctttaaattgatctttttttggatcgaaagcttgcgctgtaaatggtaagatttctttgttaattaatgacataaatatcttcctcctaagaatttaagtatgaattagaactatcaattgattgcgcttaattataataattctaatctcttagttagcattattacattttgatccagaatagtcaactggataactttgtaaagtgaatgattacttttaaaataaagaaagataatataaagtgctttgataatggattttgtagttgatgatttaaaaggttgtgtctatatttaatatcttgattttaatgtaaaaaatgtaaaaaaagaagatttgtattctcaactaagtcaaccttattgataatggtgtgagaatatttgttcgagatggatgaaggtaatgagtgagaaactggatttttaaagtatgagacaatattttaaaaagttcaattattaacttataagcaaataattgctataaaaaagtttggacgtgtacaattgcaatatgaagattttaaattaattgtaaagtatcgaggagtgggtaacgtgtcagaacatgtatataatcttgtgaaaaagcatcattctgttagaaaatttaagaataaacctttaagtgaagacgttgttaagaaattggtagaagctggacaaagcgcttcgacgtcaagtttcctgcaagcatactcaattattggtatcgacgatgagaagattaaagaaaatttacgagaagtttctggacaaccttatgttgtagaaaatggctatttattcgtctttgttattgattattatcgtcatcatttagttgatcaacatgctgaaactgatatggaaaatgcatatggttcaacggaaggtttgctagtaggtgcaatcgatgcagcattagttgccgaaaatattgcggtaactgctgaagatatggggtatggcattgtctttttaggatcattaagaaatgatgttgaacgcgttcgagaaattttagacttacctgactatgtcttcccggtatttggtatggcagtaggggaacccgcagatgacgaaaatggtgcagccaagccacgcttaccatttgaccatgtcttccatcataataagtatcatgctgataaggaaacacagtatgcacaaatggcagattacgaccagacaatcagcgagtactatgatcaacgtacaaacgggaatcgcaaagaaacatggtcgcagcaaattgagatgttcctaggaaacaaagcaagattagatatgttagaacaattgcaaaaatcaggcttaatacagcgatagcaagataccaaaataacccgcccccctctagcttaaaatgataagtatagctagagggggcgggtatttcttgcaatgaattagtgtgaagttaatgcagcattatcatttgaatcgaaagtatctttatcccaatgtttagttaacttggcggtacctgtaccagctagcattgaatcgttcacgtttaatgctgttctacccatgtcaatcaatggttcaacggagatgagcacgccggctaaagcgactggcaagtttaacgttgacaacaccaatatggatgcaaatgtagccccgccaccgacgccagcaacgccgaatgaactaataatcacgacagcgattaacgttacaataaattgtaaatcaatttctacattagcgacgggtgcgaccataattgcaagcatggcagggtaaatgcctgcacaaccattttgtccaatcgacaatccaaatgtcgcagcgaaattggcaataccttctggcacgcctagacgtcttgtttgtgtttgtacattcaatggtaaggcacccgcgcttgagcgtgatgtgaatgcaaagattaatacttccaaagtctttttaacatagcgaattgggctaatacctaacaggcttaaaataattaagtgaatgatatacatcgtaattaatgcagcgtacgatgcgattaagaattttcctaaagtccaaatggcgccaaagtcacttgtcgataatgtgttggccataattgctaatacaccgtatggcgttaaacgtaagacgaacgtcacaatcgccattactagtgaatagatagcgtcaatcgcacgcttaagcaattcaccatgatcaggttgtttgcgtgctacgcgtaaataagcaaatcctataaacgaagcaaatatcacgacagcaatcgtggaagttgcacgttgtccagtgaaatctaagaatggatttttaggcaataattccaaaatttgttgtggtaacgtatgtgctgttaaatctttcgcttgtttagcaatttcgcttccacgtgcttgttcagcgttaccaaggttaattgttgatgcatctaaaccaaacaccaaggcatacacaacaccaacaatcgcagcaatggtgacagtgccaattaaaaagataaaaatgagactaccaattttagcaaacttttctccgatttgaattttagtgaatgcagctacaatagaaatgaaaattaaaggcataacaatcatttgcaacaatgcaacgtaaccttgtccgacaatgttgaaccagtcacttgttgatgtaataacattcgaatgtgtgccataaataagatgcaataacacaccgaatactataccaatccctaaagctgtaaacacacgtttcgcaaaagatatatgtttgcgagccatcatgtgcaatattacgatgaaaatcaccaatacaataatattaatcagtgtaagaaaagcattcatgaacgtcactcctcaaatttttgaatataattccgactagtatgctaagaataatattaattttaaaatatttcaagagggcatttgcaattaaatgtaaacatgatgaaattcgaccgttggcataaggggatttgtaaacaaatcgttttgaattcagtagtgataggtggaaagggtaaatagtgtgatgagctagtcgattaaagttaatatttgaaaatgaagcagggcattaaatgcaataaattaaataagttgtcattaaagcattaataatagaaatgattttaacaggaaaaaagtgatgaatatttggaaaagatatatatcgtgcactgtcatgagagataagatatgagaaaacaaatttatccttgaatcgagatgtggctatggcggtttgataaaaattgctaacctcatatttattgaatgaaaagataataaatgatcaaccttgaaaagacgtttcgaacaaacacgttgtaaaaaattctgtcgaatcaaaattagcatcttttgagtgttcgtgtgtgcaggtggtagttcaaaagctaccgtaaacaaatatttttgtttgagcaaaaaggcgtttgtagtaaatgtgaatatgagtgtgcacttgtgcgattcgtcagttactaacacagccaaacatttaaattgaatggacttattaagatgaatctatttagaagtacacagaagccatcccatttaaaagtaacatactataaaaatttattcaaaattcaatattaatcataatgaataattaaaaaacctgaaacaaattagtttgatatgctctcttcaaagtagatattgaatggagtatatcagcttgtttcaggttttatgaattgagtattaaatttgaaagtaaattacagttctataggtttataaaaatcagtttttaaatcaaagctatatatgaattgagtattaaatttgtgttcaaatcacaagtttacaggttgaataaacgtgcgaagaaaccttttttctcttcttgaggttttggttctgacatttctgactgtgaagctgtgctgtcattttctgctttcgcttccaatgaatcgttcgaagtagcttgtttagaagcttctgcatgggcttctgctacttgttgttcagcatcatgttgcgcttctgcatctactgtagcttctttatttgaagtctcagctgcattgtcatttttagactgctcaacgctggctttttcaattgcttcagttgcagaaatttgatcctctttatctactttagtagcagtgccatcgcctgcattttctgctttagtatccgtcttagcgtctgttgatgtattcactccagcaaccttcgaatctttactgtcagctttatcttcagtaacagcattcttttcaactttatttgttgattcagctaatgcttttgcttgagaggcttgcgcttcttggatagcctcttgtgatgtttggatggcttttaaggattcgctatttgaatcgattttagatgtaagttgattttgaagttcttttaattcttgttgttgctgatgtacttgattcatcatttgaccaagtaggtgacgttcttcgcgcattttctggatttctaggcgtaaatcttctactagttgagcgacattttgattagtaggtaagtttttgtcatcgtttttgacaatgacttgcaggaagtctttttctttttctaattcatcaaacgctagatcataactatttgtttgttttactttgtcggcaatgtctttgaaaagctcgatatcttcttctttgaaatcagttgcttcacgaccacgatattcagtcttgcttagttggtaaccacgttcttctaaatgttgaacaattttacgtacttgcttctcacttagttctacgcgttgtgcaaattctttagttaacatactttaaagtcctttctgcatatactttatgtatactgacgtttgtctacgggcagtgaaacgtcagtcttgcttcatacatagtttaaacgttattgttagtgatttcaagtttgtttaaaatggtttacgtaaatccatttcttctaataaagcataaataatttcacgtgcgataccattggcaaatacatacttcaaaatataatttgatttaacacttgtaccgtagatatcctttgtcagtttaatatttttctttaaaaataagtccacttttttagtgtgaccatcattagttggatgaatgtaatcaatttcagtttgtctttcaaattgatgttcgtataaaaactgtctacggtgttcaataatgaggccgttatcttgtgttaaatctgcaggttctttagggacttccatcattaaaaagttaatacttctagaatgaacaaggtttgataataagtttagttcatgttcaatttgatgtaatgtttgcgtcattaactcatcatggttgggtaggtcttttgcgaataaataaattaaaaatgctgaattggttgtggcttcataatgtgcagttgctagactgacaacaacatcgttttctaagcctacgataaagacataatcgttttcggttttgttgttttctaatgagcgtttgatgatacgtttatcttcagttaaagataaatttaacttagtatcgtaaagtttaagtgcttcgttgtaatgtggatctttgacagattgaatggttttaaattccataagaacacctccccaatttaaataatattatagcataatcgcctgctgtaaaagactgttcataaacttttaaatggtataaaaaactgtactatcttaaattagacagtacagtaatctcattttgaattcagtgtgataactaagctttgggacctttagatgcttcagcaaaatgtgtaatatcaatctcttcataagctgaattattttcatgcacttcttgatgtgatgatttgtcacgaaccgctacaactaacattttatcgtctaaaataagttgtttatatttttctaattcatcaggcgctaagttgtagcgtgataaaactgcatgttcaccatcttctcctgttaacagtttagtcattctatcactaaatgttccacttgttgagataagggagatttcagagtcgtgtaagtcatttaggtgtaatttacttttactaataattgttagctctgattctaaataaccttcagatttcttttgattgattacgttgtataattcgccagtgtcatttactacagtaatatctgccatagttgtcgcccctttaaaaatttgtttatttaatcttttacccttcttattataaagtaaaacccttacattattaagttataagtcttcattcgcattaaacgtctctgtacatttataaaactattaaaagattacctaagcagttattgaaaaaatgccgaaaatttgctattatcgttaaataatttacataaactcatataatctaaagaatatggctttagaagtttctaccatgttgccttgaacgacatgactatgagtaacaacacaatactaggagtagcttcagccattaaattgtaaccatggtgggtgatttatatcattttatatgatggtcacagtttatttgatgaaacttcttttacattgattgcatgacaaattcgttatgcatgttcgttcactcataaaccctgaaactattatttagtttggggatttttttgtatctagcaccaatttaagagcaaaatgtttcacacaaatctgaggaggttttaagagtggagttactaggacaaaaagtaaaggaagacggcgttgtcattgatgagaagattttaaaagtcgatggatttttaaatcatcaaattgatgcaaagttaatgaatgaagttggtcgcactttttacgagcaatttaaagataaagggattactaaaatcttaaccattgaagcttccggtatcgcacctgcaatcatggctgcactgcattttgatgtgccatgtttatttgcgaaaaaagcaaaacctagcactttgacggatggttattatgaaacatctattcattcatttactaaaaataaaacaagtacggtcattgtttcaaaagagtttttatcagaagaagatactgtacttatcatcgatgactttttagcaaatggtgatgcttcattaggattatacgatatcgcacagcaagcgaatgctaagacagctggtattggtattgttgttgaaaagagtttccaaaatgggcatcaacgtttagaagaagcaggtttaacagtttcttctctctgcaaggttgcttcactagaaggaaacaaagtgacattggtgggagaagaataatgaaaaatttaatcctaagtgttcaacatcttttagctatgtacgcaggtgctatcttagttccaatcattgttggtacaagtttgaagtttacacctgaacaaatcgcttacttagttacagtagatatatttatgtgtggggttgccacatttttacaagccaataaagtaacaggaacaggattaccaatcgttcttggatgtacattcacggctgttgcgcccatgattttaattggtcaaacgaaaggaatagatgtactttatggttcgctatttttatcagggatattagttattatcatcgcgcctttcttttcacatcttgtaaaattcttcccaccagtagtaacgggtagtgttgttactatcattggtatcaatttaatgccagtagcaatgaattacttagctggaggtcaaggtgcaaaggactatggagatgttaagaacattttgttaggtttaatgacattaatcattattcttcttttacaaagattcacaactggatttattaagagtattgccatattaattggactcgttttaggaacgataggcgctggcttacttgggatggtcgatattaatcaagtcaatcatgccggttggttaggcatcccagtgccgtttagattctctggatttagctttgatgtgacatcgacgttagtgttctttattgtagctatcgttagtttaattgagtcgacaggtgtctatcatgcgttaagtgaaattaccggtaagaagttagaaagaaaagattttcgtaaaggttatactgcggaaggtctagcgatagtgttaggttctatattcaattcatttccgtatacagcctattcgcaaaatgtaggacttgtttctttatccggcgctaagaaaaacaatgttatatacggcatggtcgtgttattacttatatgtggttgtatacctaagcttggcgcattagcaaatatcataccgctacctgtgttaggcggtgcgatgatagctatgtttggcatggtaatggcatatggtgttagtatattaggacatatcgattttaaaaatcaaaacaatttattaattatcgctgtatcagtaggattaggtactggtataagcgctgtaccacaagcatttaaaggtttaggtgaacaatttgcatggttgactcaaaacggaattgttttaggcgcaatctctgcaattattcttaatttcttttttaatggaataaagtataaacaaacggaagaaaatgtgaaataatataactaattaatttgaaaaatggaggctgtttttaatgtgggaaagtaaatttgcaaaagaatcattaacgtttgatgatgtgttattaattccagcacaatctgatattttaccgaaagacgttgatttaagcgtacaattatcagacaaagttaaattaaatattccagttatttctgctggtatggatactgtaactgaatctaaaatggcgattgctatggctcgtcaaggtggtttaggtgttattcataaaaatatgggcgttgaagaacaagcggacgaagttcaaaaagtaaaacgctcagaaaatggtgtcatttcaaacccatttttcttaacgccagaagaaagcgtttatgaagcagaagcattaatgggtaaataccgtatttcaggtgtaccaattgttgataataaagaagatcgcaacttagtaggtattttaacaaaccgtgacttacgttttattgaagacttctcgattaaaattgtagatgtaatgacgcaagaaaatttaattacagctccagtgaatacaacacttgaagaagcagaaaaaattctccaaaaacataagattgaaaagttaccattagttaaagacggacgtctagaaggtcttattactattaaagatattgaaaaagttatcgaattccctaatgcagcaaaagatgaacatggtcgtctacttgtagccgcagcaattggtatttcaaaagatactgatattcgtgctcaaaaattagtcgaagcaggtgtggatgtcttagttatcgatacagcacatggtcactctaaaggtgttatcgatcaagtgaaacatattaagaagacttacccagaaatcacattagtagcaggtaacgtagcaactgcagaagcaacaaaagatttatttgaagcgggtgcagatattgttaaagttggtattggcccaggttcaatttgtacgacgcgtgttgtagcaggtgttggtgtaccacaaattacagcaatttatgattgtgcaactgaagcacgcaaacatggtaaagctatcattgctgatggtggtattaaattctcaggagatatcattaaagcattagctgctggtggacatgcggttatgttaggtagcttattagcaggtactgaagaaagcccaggcgcaacagaaattttccaaggtagacaatataaagtataccgtggtatgggctctttaggtgcgatggaaaaaggttcaaacgaccgttacttccaagaggacaaagcgcctaagaaatttgttcctgaaggtatcgaaggacgtacggcttataaaggtgcgttacaagatacaatttaccaattaatgggcggtgtgcgtgctggtatgggttatactggttcacacgatttaagagaattacgcgaagaagcacaatttacacgtatgggtcctgctggtttagcagaaagccatccacataatattcaaattacgaaagaatcaccgaactactcattctaattaagataaaggagaacgacaaatatggaaatggcaaaagaacaagagttaatccttgtcttagactttggtagccaatacaaccaattaattacacgccgaattcgtgaaatgggcgtttatagtgaattacacgatcatgaaatttcaattgaagaaattaagaaaatgaatccaaaaggtattatcttatcaggtggtccaaattcagtttatgaagaaggttcatttacaattgatccggaaatatataatttaggaattccagtacttggtatttgttacggcatgcaattaactactaaattattaggtggtaaagttgaacgtgccaatgaacgtgaatacggtaaagcaatcattaatgcgaagtcagatgagttattcgctggcttaccagcagaacaaactgtttggatgagtcattctgataaagttattgaaattccagaaggctttgaagttatcgctgatagcccaagcacagactatgcagcaatcgaagataagaaacgtcgcatttatggtgttcaattccatccagaagtacgtcatacagaatatggtaatgatttattaaataattttgtccgtcgtgtttgtgattgtagaggtcaatggacaatggaaaactttatcgaaatcgaaattgaaaagattcgtcaacgcgtaggagaccgtcgtgtattatgtgcgatgagtggcggcgtagattcatctgttgtagctgtactattgcataaagcaataggtgatcaactaacatgtatctttgtagaccatggcttacttcgtaaaggtgaaggcgacatggttatggagcaattcggtgaaggtttcaacatgaatattattcgtgttaatgcgaaagatcgctttatgaataaattaaaaggtgtttcagatcctgaacaaaaacgtaaaatcattggtaatgaatttgtatacgtatttgatgatgaagcatcaaaactgaaaggtgtagacttccttgcgcaaggaacactatatacagacgtcatcgaatcaggtactaaaacagcacaaacaatcaaatcacaccacaatgttggtggattaccagaagacatggaattcgaattaatcgaaccaatcaatacattgtttaaagatgaagtacgtaaattaggtattgagttaggtattccagaacatttagtatggagacaaccattcccaggacctggtcttggtattcgtgtacttggagaaattactgaagataaactagaaatcgttagagaatcagacgcgattttacgccaagtgattagagaagaaggtcttgaaagagaaatttggcaatacttcacagtgttaccaaacattcaatcagtaggtgttatgggagactaccgtacgtatgatcacacagtaggtattcgtgcagtaacatctatcgacggtatgacaagtgacttcgcacgcatcgattgggaagtcttacaaaagatttctagtcgtatcgtaaacgaagtagatcacgtcaaccgcgtagtctatgacattacatcaaaaccaccaagcacaattgagtgggagtagttgtaggagagctagaaatcctcttataccaagggtttctggctcttcttatctttttactgcacttttattgcacttttttcatttctttgtttcgcaagtagtctacagtaaattgattctttggtgaagtatcataattttgttttgcttctttaaaggaaatggctccatttaatttgttagctacctcgaaattactgttaggataaagatgtccatacgttcctaaagtcgtctcaatatcttcgtgtcctagacgatctttaatgataagtggattttctcccatactgattaacaaggaagcatgagaatgccgtaacccatggattctgattcgatggataccagccagcttagcatagcgttcaatagcatatgatagtgtatgtttttgggtaggaataccgttatagctcattacaaagtctgtctgaattagattttgttgtacttccttccattcggataaataagttaatgtgcatttatctaatacaatatgacgaacgctcgcctttgtttttggttcaacaaatctataattcgattgattcttgtaatagagtgttttgttgatggttagtactcctgagtcaaaatcaatatcttcccattgaatggcagtagcttcaccaattcgcattccagtcataaataaaaaccacagagagataaataaaaagtgttgatagtaatcttctttgtaaattagagagattactttttcaaattcttcttttgtccaaaattcaattttagacttttgctttttcacattgccaataatcttagatggatttgtggtggttatcccaaggacaattgctcgatccatagcaactgaaaatagtccttgaacagctcttacataagaagacttacacttctttgataattttagttgccaattttgcacatcaataggctcaatatcggaaacagccattttatcaaaataagagaaatgcttcttaatagttggtaagcgattttcatatgttctgagctttacctgtgtcttataccatggaaggaaaatttcaaagatataatgtttaaacgtcattttatccttattctcacttaattcttctggtttcatcaatagcagtttcgaatattcttctcttgcttcttttttagtagtgaatccactacgatatttttgaatttttttccctttagaatcataacctagatttgcacgaaaataataggttccattctttgctttttttattgggtctttaaccatagtttttactccttactgtgcaaaaactactcagacctgttttcatttgaaaaccgaattcctagaatttcttcaacagcttcacgagggactctatctagctttcgagattgatagtagatatgcccttttgtaatcatcaattcttttgctttttttatgatgtctgctgaaaaagaagttccatatcctagctcaactaaatccttttttgtgaccgttatcattattactcctttcccaattataggctaggaaaactccaatattcacctataattatatcaaatagttttataataatacactgacaagagaagaatatcttagcaatcgaacagctctagcaaagctcacaggaatttcacttctgcatggttctcatgtagccgtacccattgcctgtgacgcttctaacgctcggactatggctatacgggagtatcattatcacgataagaaagtcatggcagcaatcctgctaaagattactttcgaattactaacatgaatcgctcactaattttgtaggtcatggcgtgttagttcatcagctcttttcttaccgaaacgtattcgattgcctttatttggttgtcaaagaacgtttggcttgttagcctatcaaaacctactgaacacacaatatgctttgatggaataacaaacctcccaaatcgggaagcgtggatacgattcgacacgcttccacgaaaaaatgggactatttaatttcgaacgataaaatcttagagatgagtttcgtttccattctgccacgtagggtttcatcaataaccatatgagaatttccatattcgtctgtcatgcgacgtaatgaacgttttgaggtataccctcgataatgtttaacaatctgattaattgcttccacgtcgccatctgtcgcctttacaatgagggggaagggaacccttggataagctgttttcattctttacactccttcatgaattctttaatcatggctagtccacttattcgatgacgataaacagtcgaacgattcaaatttagtaactccgcaatctccacatcactcatatccataaagtaatgaagtaaaataatgttccgttttttctctgaaagatgacgcagggcttcacttaataaatcactttcaacattgattcttaatccaaataatttaaatagttggaaatcagtgacgtacgtatcaacagtagaaaaagagttgacaaggtagttatctatatcagaaaacgagacttcttttgctgatagtctgtctagatgtttgaagtaatcttttcgttcatcttcaataacttgtttgcagatatagtcaaactgattttctatggtttcttgaaaagaagatggtttcatgcttttcaccccctttctgtcgtgaaagggagtggcatgtgcttctttatctcccttcatactaagccccgacacgaaagggggatttgttgcataaatgaagagaaatcctaaaagatatttattaagtgaccaaaaaagcacataaacagattgttttctctgttcatatgctttgatttttctatctatgtaatctgcaaaaccacattgatggtcatatctatccagtacaggtggataagtttttttgataagaacttaattaagagaactagatgacagattatctttctcatggcgacttttccctccattaagtcgccaattttatctactttctaggagtatgactaaattttataaagttgtataggtaaataaaatcagcgacctttctatttgaaattggattcatcgcattaataaattccacagtgttctataggaactcataaactatataacatgtttttctatacctgtttatggctatataggaacagtaaaatgtatagaggtgatttagtatgcgtaaaaaagaagataaatacgattttagagccgttggtttagcgattaaagaggctcgaatgaaacggggtctcactcgtgaacaagtgggaacaatgattgaaattgacccacgttatttaacaaatatagaaaacaaaggacaacacccaagtacacaagtgctgtatgatcttgtatcattactccatgtatctattgatgaatttttcttacctacagataatttgattaaaagcactcgaaggttacaggtagaaaaatacatggatagctttacagacaaagaactatccttaatggaagcactagcaaaaggtatcaatgaagcaagaaatattgaaggctagtcagtaaaattcagataaacaaaaagagccgataagatgagagtttcatttctcaaattatcggctctgcgtcttggcgtctggctctttgattgttattatattcattttttgaacattaattaaagtttcgttcttacatttggggcagtataaagggaaatttttaagtatagtatccactcgtattcgtagtcttgttttatttccacaaataggacacaatatccacttgtagtttataataacaatctcctcctttccactttaattcaaatctatattaaagaatatttcatcttatttaataagaaaccatatttatataacaacataaaacgcactaagttattttattgaacatatatcttactttatctatccgactatttagacgacgggtctggcaaacaggttcgccagtggtaacctgatatccttttagctctgctaaacaaacactaagcccatttgtaaaaaaagttaaatcattgcgataatcttgaatacatcgagcaggaatttctccaataataatgacctcattatttttcagttgagtatttacgatatttgcacaatatttgggagcatcgttatatgcccgtgaaagatattcctgtggtgcataaactttaaaactaagatatggctctaacaattctgttccagcttttctaaaggcttgctccagtacaataggagtaagcatccgaaaatctgctggagtactaacagggctatagtataaaccgtacttaaaacagattttacaatccgtcacattccaaccatataatccttgttcgcaaccatagcgtatcccttccataactgcattttgaaatgattgatttaagtatccaagagaaaccgagctctcatactgcattccacttcccaacggaagcggtgatacagataaaccaatggaagcccagaaaggatttggcggcacttcgatgtgaatggtatattctgcattttttaacggtctctccatataaatgactgtaggctcttttagttctatctccacatgatacttttcttgcaacagtgcactaatcacttccatttgtactttccctaagaaagaaagtataatttcatgtgtcgtagaatccacgtaatatcgtagaagcggatcactatctgagatttccaaaagggcatcaagcaacatttctctctgttcaggtttactcggttcaacagttgtttgtagtagagggtgcggattttcaatcttttttctctgtggcaatagttttgtatctccaagaacactatttaacttcaaaaactcattttgcaaaataacaatttctccagaataagctctatcaatcttacataattcaccatttattgaagtatacatttctgtaacttttatttttctttttctgatactctaaccgaatctcgtaaatgtagtactccactataaaggcgtatatatgcaagacgttgtcttttttttgtatattcaattttgaaaacatttccgcaaagttcagacggacctcgatgtgttgatgaataaaatttattagtaataacttctataaggttatcaatccctatattactttttgcacttccatgataaagagggaacagagaacaattctgaaatcttatgctttcctcttgttcgagttccaatgcttctaatgatttaccggacatatatttctctaaaaggtcatcgtttccctctattaccgtatcccattgttcagattcggtaaagttcgtcacacacatattaggatacagttctaccttctgtttgattacaatttcggcagaaagtttctctttaatatcctgataaaccgttgataaatcaattccattttggtcaatcttattgataaaaaagattgtgggaatccccattttcctaagtgcatgaaataatatacgagtttgtgcttgtacgccatcttttgcagaaatcagtagaattgccccatctaaaactgataatgaacgatatacttctgctaagaaatccatatgtcctggcgtgtctatgatgttcaccttcgtattttcccactgaaaagaggttattcctgtctgaattgtaattcctctctgacgttctaaaagcgtattatccgtcctcgttgtacctttgtccacgcttcctaattctgtaatcgctccactgttatataataagctttctgttaaggtagtttttcctgcatcaacatgagctaaaactccaatattaataattttcatgtgattttcctccattcaaaaacccaaaagggcataaaaatcccagtgataaatacttttatcactgggattttttatgcataaccataggtatacaaagcatacagatattctctggatactttagaatcacatgataaaggtattcttaaactgggtacaaaaaactaagccctcctaaaaaaggacatctaattatttgttcccgctatcaaattgacagtttatttaagaataccttgccgcatatttattaactccttttaaatagtcacttaaataatagcacgtaagagcatatttgtaaaggaatctccaattttttatcaaaaagagtacatgattacaaagtatctgtaatcatgtaccaatatttgttattttacaatcttccaattatcttgtttttctaatatcaactcaaattgcgagatttgggttgcctttgtttcttgatctaaatatttcacagcgacattcacgattacttggttatcttttctggtaaagataggattcaccaattcctcgaaaacatattccttgttaatcataggtaacacatgattacttacatagtaagtcaattctttttctgtggcggtaggatagagctggaagaacgtttctaaaaagctagtgatttcgtccatcgtttctgtatctactgtatggtcactttctagctgtttgggttggtagtccgatttttgaggtttcttactcattgtcggatttttgataataaccatattatctgattcatctatatggacaaccacatgaaagctagacgatatagtttccttgtctttgtcttcggtaataacttgttcaacagaaaacagtacctcaaaggtgttctcattcacttgagaaacctgccacacctgtatatcgttcacactagaactagtaggaatatccttacgaatcatttcttcatttaatacctgcaattcttccgtcaaataatgggtcaatttttcatttcgtttatcaatggcttcttgggattgttgccacgaaaagtagtctttcgcaaaggatttcacaaaactttctacttggttggtatcgacaatctgctgtttaatgatttctgtttcacggacagtatgagtgtcaatggcagtaaaatttttatagattccaaatccgacactaccaatcaataaaacccataaaacaaaggttaatttcttatgcgtgccaactttaatcatcggaacttttctttgcttgctcggttttttagatttctttggtttctccttcttttcttttcgctcgatttttataatcatttgattcattcctttcttagttatgaataacacgtctagccccaatcagatggtcttgccaataacgactgcttaagtcgccataaccgattgggtcgcctgcatgataaaagcgatttccctctaaatatatcgccacatgagtcacatatgtgcctgcattataggttgaatgaaagaagataaggtcgcctgcttgggcttcttccatagagatttcttgcgtagcgtcatactgatcttgggcgacacgagggagagaaatgccagctttgtcatacacccattgtattaagccactacaatcaaaagaggtggtaggcgacgcccctccaaagacatagggaaacccttcgtatttcaaggcttcgtccataatgacttgcacggtttcatcatcaaattctgttggggaagtgtcggttaggtattgtgaaaccaactgaacataaaactgatttccatagttatatcgccaaccaccattcacaggtatggctatgggattgggatagtctgctttttgaccacccgacttctctttagaaaactgttcggctaattcataggtatattttttcccatgactcctcacataatttaaaaagccaccgccataattataagattggataacagaatctatatccactccttgttgttctgcactggttaataattcactgaaatatttaaccccttgtttgatggactcttcggtactcaaactgttgggcggtaaacccaaagattcggaactttgcataacatcttctgctgtaccgcccgattccacttgcataatggctaagatataagaaacatagtcttcaatcccatattccttaccatatttttcaatcaacggacggtgtgccaacacttctggtgaaacggtcacaccgccttgtggaatagaagaatccttgttgttttcgccactgtccgtatcatctgcaaagaaaatgactaggaataataagagaaaaaagaagagagagaagaccacactacaaatcactgttatttttagcttcatgtttgttgtcctcgcttatccgttcttttatttagcttcctctgattgaattgcttcggtggtgtcttttgtttttgctcttttttcaatggtcgctgatgattttcacgtttagtgttttgtgacaaaacaggcgtgacggtttgctgacgcttgcgaacatgctgctggttattctgaacaggagatgatgggttttcttttcgtcttttttcttttgctttatccagctccaaacgcttttgagcaatgttctttcgtttttgctcctgctggttcatacgctgttgtttgcgttgagctttggtatctgccatagattgtttaaagtctgttacattatgagtgacattctcttttccttgatgaagggcatatttgacatgggttggtgtcgcctgtatctgttgttttgcctgctttcttttattgactagacgatttttcgtgtccaatacatgggctgtcttttcacctaatcgttgcccgataccgccttgttgctttttcacattggaaagtgctgtttctttctttggtgtagtccgttcattttgacgagtatggttagctttattggtttgattctgctttgttgtcattgtcttttgcttcgttgaccctgcttttccacgaaaaatcttactcatactgcgttgaaatcttctggtttgtcgattcatcatttgacgaggtctgcgaaacacttgtctgcccatgttttgagagtcgttgctttgtaaagagaataggctcattaaatcgcccagtttaaaataaatccctgcaaaggtcacaatttgtaaaaacataatcatgaaaaagggagaacttgctgacagcgaataaagcatagtggaaatactaaaggcaacggtaataatcaaggtaataccagcccttgtcataatcacattaaataacttggtaatggcatgcctgcccatgccatcaaaactcggcaacatacttaataggaaactgattggcaaaaacatagcgaaaataataaatagcacttgcgaaaaaatcatgattcctgttagaaggaaaacaaaaatcgagataccaatattgaatacaaacaaaaagaagactgttcctaatctggaaatcgtcttcggtagggttaaataggtattgtcatgatcttcaatttcttcaatcactacattttctctatcttcaccattgtttgtatctggactggtagacaataaactttccacacgttcttcccctaacgcttctacatcagtggagccatattgaagcaatagccatggttgctttacttgaacagagaataagctgtcacgtatcatgtccacactgtctttcccttgactatccgtgttaggaagaacaatttttgtcccaatattcagactggcggtactgacatctttggaaaaatcattgattttcgcaatataatcgggtgcatacgcaataaaggaagccgatagaataaacaccacgacaaagtttaaaacagctcgtatcactttcgtcgtttctcgcttaaccaatcctgtataggcaacatagattccaacaatgagaataaaaagaaggaggaaaccgacataaaaccctgaactggaaaagccattcggtgtaatgcctgcaatcgtctgcatgttttcgccaattgcttgggatgtttgactaatgaaatctaaggcataggcttctttcaccaaataacctgtggcgttcgatagataaagagaaattgtccaaataaaattagtaatggcatacaatccatacatcaccgattgtcctatgccatcactccaattccatggaagccagccccagctattgtccacataataatcaagctgatattgattcaaaccatacttggagtattcattgcttgtatcaatggtttcatcaactaagcctgtcgcttgtactgcattgcccagcgtgcctaataaaagtaaaataacgcccacacaaaggagcgttatccaactatagtgaagaaatttcttttgtttttgtgtcattcttccacctcatttcgcacaggcggtctggtatcaaaggcatgaagcaactcttcaaaaatcgggtgaaactgcataacccctacacgaccatagatgtctgaaactaaacattgtccattttctaattcacgtaagcgtttctgattgttttcatcttccttgtccacaccaaaaaattctaaggtctttttgatttccactaggtcagtggaacgaaaggcaaatttcaagccaatattattcttcatcttttcatctagtaaatcgtccgcgttttgagtaacgaaatagacccctgcattcatggcacgtcctgctcgaaccaatcgcatagatagagcttttccttgtgccacttgtaaaaaactccaagcctcatcaaggtcaacaattttaaaaatggaacggtcagagtggataaagtctaaagcaaaggtactaatgacaatcagcattgccacacttaataattccatggtagtgtattcttcaaaagagctattggaatcgggtaagaccaaatctgccacttgaataatattgagttgtttttccaagctaatggattgggtgacactgccatcactgaataacagatgggcaaaatcataatcgacaaagctttcgatatggtcagcaatactattgctgatgggcgtatcttcttttcgcaattcatcaatcaccaataacaaccctcgttgtttgctttgagttacactccgaatagctttacgcaggacaggaaacttctcgctatctcggctggaaatacctgttaagaacgtgagaatatcaatggcaaggctttctgaatctttcgggagttttaaaatcacataagggtcaagtaaccctttattgtcgttctcactcgtgagattaacaatattgatttcatgggcaatatcaggtaaggtttctttccattcaccacgttcagcttttgggtcaacaatggttgcctgtccgccaaagagtactgaataatagaccagcatattgttagagaatgattttccgccacctaatgaaccaataaaagcggacgctaatgcatttgttacagagcctttaattccttgacttgcaaggctaggttggagataaatatttctgcctgtatcgagattgtaaccgacgtaaataccagaattttcaccaatcatttgtgtagcaccgaaaccaagaccagccaaaaaatccgacgtgacatattgaatatagtcattgatatatcgcttgcttgagggaataaattcattatgcaagcctagcatatcgccaaaaggtcgtactaatttgatagacagatcatcataaaaatcttttacttcatcacaacgttgtttcagctcgtccaaattctttgccgatacccgtaccacatagcttagtttgtacatagattctttggtttggtctaaattactttctaattcatcgacagattctaaagcgtccaccacattagtactggtttcgttgtcgctttcccatgcgtggctatctaaatctttcagttctttctttttattgcgaacggtagataaggcttttttattggcgacaatttcaacattcatactggtatcaacggggaaagtaaactgctgttgctggtaataaaaaatttcactattagggaaatccaattcaccaacaatactattaattgtaaaatacgccacataagtagtggtatcttcctgttcaatccgtaaatagcgttgattttcttcgattaaacagcgagtgggtttgagaatatcgtatttctttaccaacacttttttatcttcgtatcgtttcggtaaatggtagtcgtagtcatcaaaagggacacctgtttgcccgtaaagatgttcaataatataaccaaaatcatctttctccaatttacgaatctgaaagcgtctggataatttactttctaacaactgttccatcttagaaaagcgttcgatttccgccataggcatagaaacaaaatcgccccttaatttgtgattcacaccatgaaagaattccgcaaatgctttttgaatttctttcccaacattttttacggatacttcctgttcattgaggtagagtttaaaaccaataaaaaagcgatagtctacttgattgtcaccaatcatagaaattaacgcttcggtctgttcatctattttttcgtaagctatctcttttaatcgtccagtgatttcttttttcgattgttcctgtgtggctcgaatacttgattcggttgctagttgcagagcatgaatcttgccatcacgattttgggcaatcaattgacagaaattatcatgaacttgaattttttcatcggaacttaaaaaactgtaattatagggaattaattcataataagcgaatacttcgccatcatgattaaatacgagattatcttccatatatttaatcggatatgccatctagttgttcactccttacaatcgtaatcgattcattcattgtttctttttttaatcgtatttgtttgccagcgtaggttactttagggcgtagagcataggtaatgatagactttagaaatccatagggtttctttccgtcaaaggtcttttggcacatgaacccagtgagaacaatgggaatccctaagtatttgagtagtgctccgtcaatcagagaaagtggtggtaaactaccaaagagtatgacgacaaacaaagaaacgataaaccatgtcatttgcgtaaaggtaattgggaaagggagttgtaaatcattaatcgcataaatcactttttctactgaccaaatactggtgtaacttcttatttttttcatgtcttcacgtcctttccgtaaaaatagaaaaagaacaatcaaaataggtgattgctctttcaatgctttaactattcaattttattttttgtccattttgcaataataccttcatcagtttcttcatcatctggattcattgaatatctgaaacttaaattggtatctgaccctaatcgttcatataagctgggtctatacaatctcgttttattgtcattaaaaggacttcgttttcccagctcaccatttccctttaaaggatttcttctaactgaaaaacaatatttttttctgggatcttctgaatcactttgacttaatgagaaacacatggcttctttttggtcttcatttttcttctcactaacttctgtcggaataaatcgagcaagagtttggctaaattgaaataaaacatctcccaagttactactgtattcgataccaaaatattctcttattgttttcgtgtctgtatataattttaccgaattagcatagacagctagcatatctgaaaaatcgttttcctttaaaaattctagttttaacagagcatattctggaactttttcctctttttcaaatagcttaacaagtacaatataattttgctgtttgtaacgaaagtaaaaggaatctatcacccatgtgttttgcaagacctttgtacacaatattgcaaagaaaaagtacacaactctgcaacctgaaattatcctttgattattttatttttgatagagcattttttagccgaaaactctctccggtaaagcttattatatgtgcgtgatggattaatcgatccactagcgcagctgtcaatcgggtatcaataaaaactttgttccattggctgaactctaaattgctggtgacaatgatgcttttagtttcataccaatcgctaatcaattgaaaaagcaattcggcaccttcttttgtaaagggcacatagcccatttcatcaagaatgattagttttaccttatcaaaccgatgcttaaaagcacccagtgtgttacttttccattgacgttccagctcactgactaggtctgatacacgccagaaacgagtttcgataccaactttcgttgccatctgccccaacgcacaggcaaggtgggttttgccggttccaggtgtacccacaaacacagcgttctctttttggcgaataaaggacagactaattaattcatcttttgttgtctcgtttggaatagcgatatgatcatgccactcataattatccaaagtccgtcggaccggaaattttgcttgtctatacagacgggccattttcaattcttctcgacaggtcaactcattctctaaaagattcatcaaccattcttccttggtttcaaatgaatcattatccactgccagcggcaaatgaggcaaccgcaattgcttacaaagctcttctaaacggaattgattcattaatcaaccaccacctccttggaaggggacaagaaggcatcatagtgttgccaatcaatatcgtatgcatccgattggtctgcagtatcgatgagctcatagaaatttgtatcgatacctaacatgtcatgtgttactagtaattcgagaaggtgattgagccgctgattttgttccttccaatcagaatggctaagaaacaatttgattcgctctggcaaatacttccaatagcgagagtagtgcatagcgcgtggtttcctacgccaatctaatattattgcctgccaatcaattgcgcgctttttcatcatgtaaggacgaggtccttccgcgataatttcgccgtcagtactgattaactgataagaatcaaaacgaagtaatccataaatgactgagtgattacgaatccgaggaatatgaatacgttccttatctagcttaatttcattatacttatttgctttgatttcaatttctttgaacacaggatactctttatctggcaaggtaattaaatcagccttttcttctagccaaagatcgttgataatcgcatacttctcgtaatgaattcgttcccgatcttgtgctaattgctgggctaataccttattgaaactggaaaaatctttcataattggggtcgctgagaaaaagttgtagcgaacatagccgactttattttctacgctgcctttctcgttaccactgcgtggattacatacctgcgtctcaaatccgtgatgagttgcgaattgtaaaaaaccatcagttaatacggcagggtctgtttttgattttactttggtgacagcagtggacatattatcaatacgaattttccgaggaataccaccagcttgtcgaaacagctctttcattccttctagtaggcactcttgattctctgctggaagtacaactgcaaaaccagcattactgaatggaaaggtcaaaactaatgtcttcacatctttaaatgccccctcgtggcaaacttccatagtcccaaaatccagctgcgcttctgctggtggatgttccaaacgctcgaatccattatcttcagagatttccgcgtagtgagttgctttccaatcttgaatgaacacacagacggttcgataagatcctttgaagccatccgctttaagagcattggtcatagcttcagcagtccttctctttttctttgggagcttcgtatcctctgaaagccagagagcaacgatatcaccccatttttcaacatacatcatcccagatttcttatgagcctttggcagaggaatcaaatcgtcatcggcatactttttagcagttcgccaattgacctctaactcctgtgcaatatgattaatagatttatcatgattattccgtaaatttctgatagtattaatatcggtcattgtgagcatttacctttcgtacctccagttatagcgtcgaaaccataactttagaggaatttcaggttgcccgcaatggctttttaattagcctaagctccttgcggagttgtgtacttttgggctgcaattgtatgtacttttattctgccacaaacaacccagcctttatctttcatgtctagttttaatagtttaagattttcaaatacatttaccataatttatacctctccgtgctatttattaatttaattataacacggattgttaaacttactgacaatattcaaataccccatgagaggtaactaggtaattaccctctatttccatatcacgtcccaaagattggtagtcaatataattttgtaaattggaagggacttcaccaagctgtcctgtttcttccacgtaataacgggcgacatcttccatcgaatcacaatcactataacaatgaatatcctctttgttttccagtaattcttccaagctactaaaccacatgccttgaatttctttgagttcattataaataggtgtaccttcgatttcttgaatggcttcacatagacggttgatttcactaatcggcgtgtattcgtccacatcaaaaggaagctcaaaatcatgtattgcatattcttcgtagtcctcatttaaaccgattctttctgccatttcttcctcatcaattggtggagtaaaccatgctccgactaattcaccttcattataccgtcctaaatttgccacatagactttcatttccaattcttatcacatcctttttataaaaatagtcataaaaaaagtagcaatcagttaatgacgctacttatcaaggtatccgctaatataatctgtaactgtacttgaaatacctattattagttttgcttctctctttccaataatatttgtattagggtgtgcaagtgaatgcctatttcttgcttcattaagagagctaatcattccatttgatgaccttatcgttgtcttcactatatcagcaagttcagtaggttgaatttctttttcaattaattgttgtatcctactatataatttagatagattttcgtctctaggaactgtaatttcatatttttttagtatttcaattaaatatccatgaaaagcagtgtgaactctgtcaaaggcacgttgatattcaccattactcataaaagactcagcgtcttcaatagcttgtgaaaccacatcactaattttcaactgactaaagttaattacttcgtaattctctggaagtggtactaaaatagtatccactaatacattatcaccttgtttatcatatatggagcttgctgtctgggtaatcaaatctttatgactttcaaaaaagtctaaatcatcaaaaggaactcttattttaagatatgtgcaaagcgtattccagccctttttatatcctttataataagtaaaatcgtcagtctcatctaaagttacctctgatattttcattttagaaacaatctcattacctccttcataataatttgaagagctctttctttctaatgttttaattaaaagagatttaaattgatcatttgtaaacatattcataaatcctttcataacaaaatatatacttcctattttatcatgaaaaatatctgttaagcaccaatgattcggttaaataagtttaataacacatctttcacgccagctgcattgaacacaagtccgacggcgattagagcaataatcaagaagccaatgagttttgaaaattctcgtttaaaacctaaaaacagtccaatgacaacaatcgctaacaataccaatgactgtgcattatccaagaaccagttgtacaaattctgcccaaaattcatgtgattgtcctcctttccttaagatatttttctcgataatagatatagctttttacacgccttaataattgaaaaggggttaaatgctctccatagacggttactcgattggtataattattataaaatctcaccttgtaaaaatcataggtatagatggtatcaccagcttgccgttttccctcaataatgagagacgtatatttccctgtattttgtatatacgcttgaaactcaatgccacactgaaaccctaacttctttaattcttttgttaaaaggctcatgtaatcaaatcctccatggctagatgttgttgttcaattaatttctcatgtttttctgtcagtttggcttcctgaatcatggtggagataatggttgtaccgttgagaacatctaaaatgcttgcgatttttaatgtaggggcgacttgatgatgtaaccagttcaatgttcgttcaaaagaataaggctctggctgtgtggttaggcgtaatgctccacgatttttaccgataaaccattcccaacgttcattagttttccaatcactccgacgtttagtgtcgtctttatctgcaaagcggatatagcgattgataatttcaaaggctgttttttccgcctgttgatgtgccaataaatctttcatggcttgggtggctcggtcattttttaaccgaatttcaaaccgattctttacttctgcgtcttctaagggaacatcatttttcacgtattgctcataatctttctcatatatacagaaatagacttcactttttaatgagccaatataaagtgtgtttcccatgtatggtttttcatcacggtgaaccaattcaccactgcgataatttttaaagcttcgaaagacggaaatgcattcttcctgtttaaatttctttgccaaatctggaatattcaaaatccctgttttatcgttgatagctaaatccaagcgtttgaaaatacctttatgttccatgcaatcttgaaagaaatcataccagctccgatgttgagccaatagaaagttttcaaactgccgacagccttttcctttcagttctaataaaacacctttacttacatcatgagagactaggacaacaatatcaccgaaacgatagtgttcgggataagaataatagccaaagtcttcgtgtagcatataatccatattcaaacgtaaaacctcaccgataatttgagccacatcattggtagggaatcgaatccgtacatagtcgaataacatctccaatgggttatcgggattgaagcgttccaaagcgttcagtaaatcttctttcacctgttgagtagggactgccttgcctgtttcaatatccgataggtaaggtctggtaatatgagaagcaaccgccagtttattttgagaaacgccataagccagtcgcttttctttcaattccttaatccaaattttttcgttttccattcgcaaacctccaatctaaaaaagatgtaaactatgacccttgagtttacacctttcatattttccgcaatcctttgtaccatcaacattggttgatgagaattgcctgttttcagttgtatttgtgcccccctgttagatagagggggctaaaggattggcgtggctaacgccacaccaatcaaagcaagtctgaacctgtacctttcacttcgtgcggtacaggctcagattgctttttttgaatgacttttcctatttctcctaagaaatcgtacctttttggtacaaggggtgtataaaactcactaatcacactttttcctgtatccacgtaacctcttcccttgatgggttttaagaaaaattgtttttgtgtatcgcttccgaacatcataccaaagcccatttcagacatacgacccaaagccacacggaagttaaagttgtcccgaatcccatcactaaaatattttgcgtctggacgttgacaggcaagaattaaaaagaagcctgcttgtcgtcctaacattacaatttgtttgagtttatgaataacggtggtactttcacgacctagcatatccatcattgccacatattcatcaaaaataagaaaattggcagacaaaccaagataagcataattttctcctgttttatagttagggtgttgtttcatggtttcactgcgatcaatcatatcttcgtaaaattgattgatacatgccaacatatcttctttacggtaatagacattattcatgaccgcccctaagtctgccaaatcagcatttttagggtcaagaatataaagctttgcatttgtatgcaggagagattcaatcaatgtgagaataaaataggattttccactaccagtgcccccagcaattaacatgtgagggagagaatcgaactcccaatagaccgattccatcaatttgacacgtccatcttgagctaccacgtcttcaatgccaattcgattgccaatagtatcataaagtaggacatactctacataagaatctttcaacgttttttccactaattcacaatacaatcctgtttctagtttgttttctaggtgcaaaagctgatcttgatatttccctaaggtgatttctacatgaatatggattagtccatctttcattcgataatatattttaggaaaatggcggattcgttgtttggttttcttgctgggtaaatctttaaagaatccctctgattgagtttcttcggcttcataccaatgattttctaaaatcatacgagctaacttttgacggtgctctaactgttttatagaatctatacgatagtgataataaagccagctgataagtccgcatacaaaaagagcagtgagaatactgctccaaaagtatggcgtatgaagttgatagaaaaatgtatctaactgaactgcttgccagttcaccgattgtaacgttctccaatgaaaagggagtaggacgactagaaaaactaccagcaatgaaattagtacaaaatgatagaccaagtgcttatcgttggctttgattcgctctcctctgtcatgaagcaatggcataaaaatcctcctttccacctatcaaaataattgtgtattgtagatacgagcctgtttatcaaaagttggttgagaaatggcttcatatttctgataagcgattcgcttttcaaagcgtaaatttttttctttcggataataatgacgtcgatagagagtgtgtcctaacagttttttcgcttcttttgtcaacggatagagatagcgaaacatgcgtccattgattttctcaatccctttgtattcgcaaaatgcctgggaaagccaatgctttttctctacctgttcaaagcgagcattttcctctaataaaaggcgagcacttcgagggtgtatcttttcccatgactgcttatcacgatagacacttgtcttgaaatacccgcagtaaaagaagttggacgcttgatagacatagccacattttccctcaattccatctgccagtgtatataaaaaatgacagtccgtatgttctttcaaccacttaattagagctgaaagagcttgactgccaaaataattggtttgattcatttctggaagaaaacacatctttccaatttctaaataatctgtggtttgaagggaactgtcgggaaagagtttgcgtatggtttgtaggggttgcgtaccccagcctaattccacaacgcctaataatttttcttctgaaaaaatccctagaaagtatttacacaatctagggagtatctttgaataatggtattgccgaataaaagaaatggcttcatctttcggaatttctttcaaaatcaatggtgtgtttgtcataagcaacacctatttttcactttcggacgcttcttttttatatttctgatgaggttttgtctgtccttttaatacaagatcgtctgctttcacgtaccaatcaacgtctgcccctcgaaaagtagccgtcgctacggtatctgccacaggattgattaattccacttctgcgttgtagtcaaattctttcaaaggaacagaagcggggatactgacttgtatcatgcgtccttgtccttttgattttaagtcataggtacgttctttaatttcttcggaaaccgtaccatcttcattctggatacgaacctcacgacgcaaggcggaaaatttcaatgtgccaaatgtctggtctttttcaatcacaataccttctgctaatctcatattttttcacctttcctttcttatgctttcaccatatcgtctgcgtgcataatgtaattggtaaatcctcgattgccaattttataaccttctgcggtaatatgtgggttgatgagtttgactttttcgtcggattcaaaatgtttctcgccagcttcggagggaagaatgacaacaatatcatctgctcgttgaatcgttgagtataaattgtaactacgagagagaatggttggtctgccatttattcgacgttgttcaatgttcccttcaccagcatattctaattgtccaaatgttttttccatattgggaatgacatatttaagttccatatttttacctatcctttctgtttttatgtttgaatgaatcttatttgtgtgatggttttaaaggggggagagcgaccttttgattcttgattttttattttcataagttcacttcctttcaaaattgggtaaaaaaatagacgctccgtactgagcgtccgattcctactatatttaaaacaacgactacctaggtattttaaatattataatcaaattctattttatctaataattgagtgggataaagcaagtctcctttactcgtaaaataacccacctctgagaaaagaaataaattattttttgctcttgaacaaattacgtatagtagttttctcgctgaactaattcctttatcagaaacattaaaaatttcattccaatgaggaattttcccgtttagaagattaatagcgataacagtatcatactcatttcctttaactttatgtgctgtagtaagtgtgataccatctcgagatttaaacatcttcttaaaactagatacactactagataatgaattattttttatccgatcttctacttcgttaataaaaaatagatagtgcttaaaaatagacgggtaatttttctcgtcaatattaagattaacaaatatatgtttggtaacaaatttgtataaatcaacaccgttgtcgtctccactatacattcttttcacactgtttattagctgtaataaatctaagtcaataaaataatctttaacttctattccaaattcattttttaatataattaaaatatcgtttgcaattagctttcttcttcgaaccttttcacctgattcagtaaagtacaaaattgctaacttgaaaaataaactatgattatttaccttaattggtgatatatttatagcatcaaaattgcaatacggtaattctttctttaaatactcacccagtgaaaacagaggatagtgttgaggagcaagtacacaaatatctttttcatgaatgccgctttcaatcttttcctttattatattttttattatgttgggtaaatcctccttagtaactttgcaatcataacttataaaaccacggtcgtttttattattccctctgctttcaatctcgtaaggacaactctgaaaattagagtagaagtctactaatctctgattagacctgtaacagccatgtagcgtctttgattgaaaagtgtgactagttagcatttctagttcttcaactgatttagctataccatctaatgatccataaattgcttggtcaatatctccaacaaacattgactgaatttgagggttgttttgaagtaatttagctattacattgtattgtaattctctagtatcttgaaattcatccacataaatcgcccttatattactagcaatattacgtgcaacgttactgtttacagttaaaattttatacgctactagtaaaatcatatcaaaatcaatttctttatttttttccaacatagtgtgatacatttcagaaacttgagtatactgaacttcattaattttaaaatcatgagaaagtgacaaatcaattttgttcagttcatacgttttgagatttaaattcagcatattattaatttggctgacgtaagctctttgagtataatcatcaataattgtaaatccttttgatactcttgagagattcattttaaaaggataaataataaattcaagacaaaactgatgtattgtccccacccaaatattaatatcatcatctatactaagtaaacttaggcgttccttaatttcttcagcagctctattagtgtatgtgatagcaattattctttttagtgatccatcgtgtttaattgcttggtaagcaattttccttgtaagtacccttgttttcccactcccaggacatgcatttacataaaggttatcttcactttccacaacatctttttgttctaaatttaaatcatttacgattttttcgaagatatttgtcattttgaaacctcagcataaagtatttttgtgtaattttctatctgattgattagatacacaacatcctcatctttaccaaagtactctaataaagaaattattgctatattcaaatcagctgtatcacttgtttttaaactagctgataaagctgacaattctgtagtttcctcgtacaagtcgattgtatggagtagaatttttttataaattgagagatctactatttcctgacatgcaaaagcaatagcattaagaatatacttaggaattttgattaaaaagtcaattttttcacctaactcaattgcaaaccaccccttaccaacatgattggctagttttaacatcgctaaatttctttctaaatattgttcactttgtatttcttctttataagcagttattgtttttttatctttgaatgcgtcatctataattggactgacataagttagaatattttctttattcacatctaaaaactcaatttcaaatgttgtattagcataaaaacaattaacccaattgttttcattaaaaagggaggataatttttcttttcttgcttgacctttctcttgtgcagtgcttttatacaatcgatgttctgatgggattgcctgttcatctaaatcagttacaatagcacactttctctgtattctatcatcgtcaaacaagctagcgatatattcaaacgaagtactaccaacattaatcaaacctattccaagttcgtctaagtttataccaaataatttttttactatttgaggaataagtatttcttcagcatctccttcaactaagataacacctttagaaaaaagcaatccatttcttttaacatctaaatatctctctactgcgtttattagatttagattgttcttttttaacttttctttagcaaatgagttcagattatttgctggattcataacgatagatttgccattaaacgattttaatacattcatccgagatatttcagacacttcagctaaatgtacagaatgtgtggtcatgagaatctgagtatagtttttttgaagatttaatccttcgaacagagttttttgaatatgatgatgaatatgagcttctggttcttcaatcaacataatattaagtagttctcttgaacgacacgcttcaaattcgactattttcaaagctaaataaatcatatttagatgtcctaaccctagtaagtctaagtcgatattttgttctggcttcattgaaagaaattttgctaaagaacccatatcatctgacatagttgaggaaagaagaagattaggagaatacactgaaccaattatgctatttagttgccgattaatattttcgccaattttcctaatttcaggaacactggtaatagtctcatttaattgctgtataattgtttttaatgactcaacattatctgatgatatttttgattcaattgtttccatgattcttttgactgggtttcgattgtttttcatttctctaagaacatctcgaagagcgtcaacataaacaaccgaaatatgcttgaaaatatctgacatgtcaattcttgagcccaacagagcttcatcgtcttcttcaggattactagctatattgtcattgagtcttcctaccaatttatcataattttcattgatacagaaatttagatttgatttagatgtgtagtaaaattcatagtcggatagacgaatagaatttctaaattcgttaaattgatgagagtctaattcagtggaaatatcaaataattgctttctaatagctttgttaggtctaataaatagagaaatactacctacacctttatctgcatttgaaatcaattcttctaagattgtttgactttcagaatttaaagaaatggaagcacaaatctcattgtcaaattcttcttcgctgattccttcaaatgtcgcagagataataatccaatgcccttgccacccattttgaattccatgaaaaaaatctgattctttcagtgttttactactatagtaataactatcatctaataagattctcaatgcagtaagagcattggttttccctgaatcattctcacctataatagtatttgtctcattatcgaatcgaaagatttcggattcataatttctaaaatttcgaatttgaagagtagatataaacataagcagatctcctaactatttaattaatatgattatatagtaagtttatcataaattatgttagtaaaagttctcattataagggagcgtcaataattttgtgtaaatgattcttccctactgcagattgtttctaattctcaatcagttggcttagcatttgttcaagttcgccttcggcctgttgaaagcctttatgactgcgacctaggaatttttggttgtaagtatcaaaagacgagactaagaaacgttccatcgactcttcgttttggaactgttccttgcggtggctgtatttcttgatttgcttattaaaggattcaatcaagttcgtagaataaatactcttgcgtatggccaaggggaaatcatagaaagtgagcaagtgatcgttcgaaagaatcgattcaaccacttttggatagctggttttccatttttccgcaaaagcaccacgtgcttccaacgccacctctttagatgaggcttgatataccattttaaaatcatcacagacttccttacgatcatcgacacgcactttgtgactgatattacgggaaacgtgtacacaacaatgttgaaaacgagctttgggatagaaccgactaatcgctcctaccatcccctttaagccatccgtgatgaacaggaggacatttttcaaaccgcgctcttgaaggtccaataaaatttcctcccaaatcgtgatggattcagtcggtgcaatcgcatagctcaatacttcctttgatccgtccgggcgaatgccaactgcgatatgaatagcttccttggcgacggttttccgctttaacggaatatacgttgcgtccatataaatagcagcataacggtcatgaagctcccgcccattaaacgccgttacctcttctgtaaatgattttgttatattggacatggtttggggcgtgtagtaatgcccatacattttctcaatcaagtctgcgatttccgacatggtaataccttttcggaagaggtgaatgacggtctccggtctcctctaacgtgtcattcgtccgtctataagcaggaacagtctgttgcttgaactcaccattgcggtcgcgcggaatctggagatgaagttccccatactcggtcttgaccgtacggtcataggagccgttacgagaattacccgtgttaaaaccaatgcgatcatacttttcgtaatctaggaaagccgttaactccgttttgagaagcgtattgactgctttctccaaatggacacggaataattcattcaaatcgcctttgttcgctagagtctttagaatttctgtagtaaaatcgttcatagggaagtcctctcttctgtgaatgtgttgtggtaactctattctacagaagggacttccttttttctatttacacaaaatattttacactctccattataacaattgggttaaaaagaaaatagatagtattctacctcatatttatttgaaagtaatatataaaagacgttcaaattcgaacgcctctcgttaaccaaatattggattcagaatctagttttcatatataaacagagtatgattaggtgcaaaaattgcacttttattgcacttttatttttatttatagtgttttactgttctgtatattgttttaactcccttgatagtatcgcattctgttttatacactttacgttgaaaacagagtgggaataattatatataataaaaccacctgtttgcacgggtggtttttaatttgagtagttggaaaattacaataaggacggaaaaggggtaaggtgttctaagtttgcgttttaattcatcaataaggcaattttccgtgtttatttttatataaaatttcatattgtttaggatcttcttgttttaaatcataaattatagtttcgtctactattttttctaattcaagtgtattaaagctccagtcatttgttgttattataaatattttttggactgggttgttatttatatgattaattagcctaggagtatctgtttctattattagagcagattctacaggatagtaaatagcaaagtctccgtgataaattgtgtttctttcatagaggttaacctctaaggttaaattactcaatttgaagattgtgttttgagttatatttttaggaataattcgattatctactatttgttttaggttgcctattgaacgagtgtgtatcgtcccttttgtgtaatcggaattatttaaagctcttaaaacagttgttaatttatactcgttaacataaccctttactaaagccatccgtttatcgctacctataaaatctttcagttttttgttgaattcattattgttgtgcataatattttatcctttccattagttgattgttttcatttgttcaaatctctatccatttactcggttacagggctgtgtatttgcagagtaatattatgattgaaataaccaacgcgttccgtattcgttttgagtgacgcagctagctgcgataatagtgacatgtggcttataacacattgtgtaatttattgtgtgttttgtgatgtctaatattgattgcagattgttgtatatttcacttaaagggcatttatataaaaaaagaggccagatgacgtatcatctgaccttcagctaaaacgctgagaatatgtcattcttcaagagaatgaagccggaatggttaccgggaatttgtaaatcaattatatcagatgtaatattacaattcaattagaaaagaactttatctttaattgcttttcgatttcattcatgtcatcttctgaaattattatcgttccagtaggatcagaatcatttattttgcttatacgtcttttgcttattgttgtaattgctgatatattaacgtatgtatctttccctttgtgcttggaataaacacctatcactctatacagttcattagctttttgatttaagttagacaaaagctttttatcttctgtgctaagtttaatgtcaatttctctatatttttgggctaatgcttgtactttactactgatatcgataatctgtttttttaaatctgttgctgttagatttagcaccgattcgtttaacttcaaataatttttattacctttggaagaaagtggaactattgtaactgtttcttttcctttattgtctttgttatctaatattacacaaaaatgattaccagaaaactcacttccaatattactccctagttttacatataccactgttcctctactatatgatttataatatctttttttattgcttgtaacatcgctatgtatagcaattgaataaaactctagccaatgaggcatgtatataactttcatgtttttactgtcggattttgaataagcttgttttagttttttgtttgacgtatttaatttactatttgcttgattgatatttttagacattaaatagtgttctcctaatcaatttattcttctttatatcagcattattagcactgaaattaacatgaatggtacgaaaatagatgttactataaaaccaacaatttttattaggtggaactcatcaattttgtatttagcaaatttcgcaatgacctgctatttattcgctttttatagttcatgtatgtgtaaaaaagtctatattgaacatctaattataagcgaattcctaatgctaaaagcaatctaacttacttaaatattattatgagtttttattgaaattaaataaatttaaactatttcttagtctctccatatcgttggaagttggttctttatataatcagataaattagaatcttcaagtaatgtatctttaaaaagttcagtttctaaatcaactttaaaatttgctttaaaacatcatgttccatttttaaatgttgaacttctttgcgtaattttattaactctttttcatcactttttaaattatcttgatgattgaagggtccagtattttggtgttgttttatcgaatttgagataattgagggttttaaatcatactttcgtataatttcattcttaagcttaccatttttatataatctaaccatttgtaacttaaactctgaactaaatgttcttctttcttttgtcataataaaattgactactttcttaatttaacaatatctattctcatagaatttgttcaattaagtgtagacgattcactgacacatcataagtacgtaaggaattttgatcgttcattgttattgctttatgttttagggaatgtgctattgaaggggttaaagatgtttgaaatgtcttggtttcttgacttatatagttatgaaagagggcgttgtcctttatagcatttctgagattagaaatgctataaataaagtgattaagattttttgttttcatgtaatttaagaaatggatttgttttttgtgggttatttttaattctgttcttaaatggtttgaattttgcgattgcaaatatgatagctgcttcttttgacaaagtaatagaacctttttcttctggtaccatgataatcactccttgtgcaattggatttaaatattataaaataattttactatacaaaatatattgtgtaaatagtttcttattgttaccaaataatatgtttggaagcgttatgtaatgccaatcaacaccgaagttctcatgtcctctttccttttacgactacatatattgttaataatattgaaataataaactgatagtgataatatttatttaactgatccatgagagtaggaaccccatcatacgggaatttcgaaatcatgggttttttgttttaaaggattgatgcaatagataaagtagccattctaatatatggagtatttatcagctgaaaattaaatcagatatgggttttcttcattaaataatttttctataaggaaacagaggcaacgctactgtcacctctgcttgaaataattaggatgaaatactctgagtctaaagtccacacacaattcgctcaaatcctccaaacctccgactacatctccacccccccaaacaccaatacttaccaaagcattgatatgagtgccaatactggcaatgtgccttgtttgaaaaagatactaatattgcttgaaaggccaccataaatagcaacgccaatgatatacactaaaatagctgcgcatatttcttttggattactgctgataaacaaaccgtatattagcaaaactccgattaaaccgttatatacgccttggttcttcaaaagtaggttaatatttttgtctttcaatttatcgacgcttatattaaatgtctcgctagtctttttggaagttgtagcaatcgtttcaaggtacataatatagaaaaactctaatgccacaaatatgattaaaattgttgagatgatattcactataacgctcctttattattaaatattttcttgtaaaaatgattgcagtgtctgtggttgatcattgactaattgttggaaatcattggattcttggtctaatagtcctcttgctcctgcgtcgtacattgatgccaataatgcaccaaagcctttaggttcatcatacatttctgcaaatgtctctaatgaaacgggctcatatttaatttctgtgcctgatgcctcagataaaattgcagcaagttctttcatatcataactgtagcctgataataagtagcgtttgccccaagtatctggatttttaataatagcaatgacacctctagcaatatcatttctagtaatataattaatacgaccatcgccagctggataaatcagtttatgcatattcatcaattctggtaaatatggtttaagtggatccatgtacattgccattcttacatacgtatagtcaatgccacttgttgccaatagacgtgctgcataaccaaaataaggactcatatggaatggattattatgctgatctgcgtaataacctatgaaaatgatatgagcaacgccgctctgctttgccgcatatactaaattttccacttcaggaatacgtttgaatgatggatggataatacttggaataaacacaacggtatccattcctttaaatgcttctaccatgctttcttgattaaaataatctaattgtcgaacaggaacttttccgcgccaatcttctggaactttctcaacatttctaacaccaatgtgaaaatgatctatgtgatttgcaatggcttgatttgtaatatgtgtgcctaaatgacctgtagcacctgttaacataatattcattcacttcatctcctaatctttatatacataacataatacttatttgatggttttcaaaacatttgattttataaaaaattctaatctgtatttattgtcgacgtgtatagtaaatacgtaaatattattaatgttgaaaatgccgtaatgacgcgttttagttgatgtgtatcactaatatcattgaaaattttaatcaggtactacgacaatatgatgtctgttttgtgtctgaaagttttacagtttttaaaataaaaatggtataaagtgtgatttgtataaaaaagagtctcgacggataagaattgattaataacagttagcattttattaattaccttaacaatgattcaagtttagttaaatgaggtttaatttgaaaggggatagcgcctcaatataatgtaggtagattgttcatattacgtaattgaaaaatcaaatttaaatagattggggctaaaaattatgaaatttaaagcgatagcaaaagcaagtttagcattgggaatgttagcaacaggtgtaattacatcgaatgtacaatcagtacaagcgaaagcagaagttaaacaacaaagtgaatcagagttaaaacactattataataaaccaattttagagcgtaaaaatgtgactggatttaaatatactgatgagggtaaacactatttagaagtcacagtagggcaacagcattctcgaatcactttacttggatctgataaagataaatttaaagacggagaaaactcaaatatagatgtgtttatccttagagaaggtgacagtagacaagcaacaaattactcaattggtggcgttacaaaatcaaatagtgtgcagtatattgattatatcaatacgccaattttagaaatcaagaaagataatgaagatgtacttaaagatttttactacatttcaaaagaagacatctcattaaaagaacttgattatagattaagagaacgtgcgattaaacaacacggcttgtattcaaatggtcttaaacaaggtcaaattacaattacaatgaatgatggcacaacacatacaatcgatttaagtcaaaaacttgaaaaagaacgtatgggtgagtcaatcgacggcactaagattaataaaattctagtagaaatgaaataatactttctaacaacaaagcgctatgttgaatagtgcttgttatggaaatatatggaagttaagcgacgtactgttgcttagcttctttttttgaggggaaaagttacaaaactcacacaaacagtcgcaccacgcattatcttttgcttaaatagcttaatcatattttatgaatagttaaaaacaggttaatgtgaatatccgaatacagctcctataatatgggtgtatgattcaaattacgtaataaaacaatctaattataatagattggagcatacaactatgaaaatgaaaaatattgcaaaaataagtttgttattaggaatattagcaacaggtgtaaacactacaacggaaaaaccagttcatgccgaaaagaaacctattgtaataagtgaaaatagcaaaaaattaaaagcttattataatcaacctagtattgaatataaaaatgtgacaggttatatcagtttcattcaaccaagtattaaatttatgaatatcatagatggtaattctgttaataatattgctttaattggcaaagataagcaacattatcatacgggtgtacatcgtaatcttaatatattttacgttaatgaggataagagatttgaaggtgcaaagtactctattgggggtatcacgagtgcaaacgataaagctgtcgacctaatagcagaagcaagagttattaaagaagatcatactggtgaatatgattatgactttttcccatttaaaatagataaagaagcgatgtcattgaaagagattgattttaaattaagaaaataccttattgataattatggtctttacggtgaaatgagtacaggaaaaattacagtcaaaaagaaatactatggaaagtatacatttgaattggataaaaagttacaagaagaccgtatgtccgatgttatcaatgtcacagatattgatagaattgaaatcaaagttataaaagcataacacatatacttgatgacgaaataagttgaaattgaaatagagaggttaagtgacgatcaaacgttgcttaacttctttttaatgcttaaaaattatttcaaaggcacatagaaacgctatattaatctcatactcactcattattttttgcttaaattacttaataatacttcaataattgttaaaaggggtttaatgtgattatcttagaacgccatctataatgatgttgtatgattcaaattacgtaaaaagacaatcgaatataatatagattggagcatacaattatgaaaatgagaacaattgctaaaaccagtttagcactagggcttttaacaacaggcgcaattacagtaacgacgcaatcggtcaaagcagaaaaaatacaatcaactaaagttgacaaagtaccaacgcttaaagcagagcgattagcaatgataaacataacagcaggtgcaaattcagcgacaacacaagcagctaacacaagacaagaacgcacgcctaaactcgaaaaggcaccaaatactaatgaggaaaaaacctcagcttccaaaatagaaaaaatatcacaacctaaacaagaagagcagaaaacgcttaatatatcagcaacgccagcgcctaaacaagaacaatcacaaacgacaaccgaatccacaacgccgaaaactaaagtgacaacacctccatcaacaaacacgccacaaccaatgcaatctactaaatcagacacaccacaatctccaaccataaaacaagcacaaacagatatgactcctaaatatgaagatttaagagcgtattatacaaaaccgagttttgaatttgaaaagcagtttggatttatgctcaaaccatggacgacggttaggtttatgaatgttattccaaataggttcatctataaaatagctttagttggaaaagatgagaaaaaatataaagatggaccttacgataatatcgatgtatttatcgttttagaagacaataaatatcaattgaaaaaatattctgtcggtggcatcacgaagactaatagtaaaaaagttaatcacaaagtagaattaagcattactaaaaaagataatcaaggtatgatttcacgcgatgtttcagaatacatgattactaaggaagagatttccttgaaagagcttgattttaaattgagaaaacaacttattgaaaaacataatctttacggtaacatgggttcaggaacaatcgttattaaaatgaaaaacggtgggaaatatacgtttgaattacacaaaaaactgcaagagcatcgtatggcaggcactaatattgataacattgaagtgaatataaaataatcatgacattctctaaatagaagctgtcatcggaaaaacaagaagttaagtgacaacggtttacatgttgcttagcttcttttattatgcgtaatgatgtaaaaagacgaatattcatttgtttgtaaaagtggcatttctatgtcttaaaagtgacgaaacttcaaatgtgccaagtgttgaatcacatcaaaatcatttttatttaacgaacattatggatttcttaatttacttaacgatgattcaaatatagttaaacaaggtttaatgtgaatggagcaatacgccatctataataaagctgtatgattcaatgaatgtaatcgaacaaatctaataattacgaatggagcatacaactatgaaaataacaacgattgctaaaacaagtttagcactaggccttttaacaacaggtgtaatcacaacgacaacgcaagcagcaaacgcgacaacaccatcttccactaaagtggaagcaccacaatcaacaccgccctcaactaaaatagaagcaccgcaatcaaaaccaaacgcgacaacaccgccctcaactaaagtagaagcaccgcaacaaacagcaaatgcgacaacaccgccttcaactaaagtgacaacacctccatcaacaaacacgccacaaccaatgcaatctactaaatcagacacaccacaatcgccaaccacaaaacaagtaccaacagaaataaatcctaaatttaaagatttaagagcgtattatacgaaaccaagtttagaatttaaaaatgagattggtattattttaaaaaaatggacgacaataagatttatgaatgttgtcccagattatttcatatataaaattgctttagttggtaaagatgataaaaaatatggtgaaggagtacataggaatgtcgatgtatttgtcgttttagaagaaaataattacaatctggaaaaatattctgtcggtggtatcacaaagagtaatagtaaaaaagttgatcacaaagcaggagtaagaattactaaggaagataataaaggtacaatctctcatgatgtttcagaattcaagattactaaagaacagatttccttgaaagaacttgattttaaattgagaaaacaacttattgaaaaaaataatctgtacggtaacgttggttcaggtaaaattgttattaaaatgaaaaacggtggaaagtacacgtttgaattgcacaaaaaattacaagaaaatcgcatggcagatgtcatagatggcactaatattgataacattgaagtgaatataaaataatcatgacattctctaaatagaagctgtcatcggaaaaacaagaagttaagtgacaacggcctacatgttgcttagcttcttttgttatgttcgatgatttgagaacccgaattttcgatgggtccaaatatgacgtggaagagacctgaatttatctgtaaatccctatctatcgggtgtgaagcacaacgggatcagttttatttaacgaacattatagattccttaatttacttaataatgattcaatgattattaaacatggtttaatgtgaaaggtcaaatacgctaactataataaagctgtatgattcaatagacgtaagcgaacaaatctaataattacgaatggagcatacaactatgaaaatgacagcaattgcgaaagcaagtttagcattaggtattttagcaacaggaacaataacgtcattgcatcaaactgtaaatgcgagtgaacataaagcaaaatatgaaaatgtgacaaaagatatctttgacttaagagattactatagtggcgcaagtaaggaacttaaaaatgttactggttatcgttatagcaaaggtggcaagcattaccttatctttgataaaaatagaaaattcacaagagtacagatatttggtaaagatattgaaagatttaaagcacgtaaaaatccgggattagacatatttgttgttaaagaagcggaaaaccgtaatggcacagtgttttcatatggtggtgtcactaagaaaaatcaagacgcttattatgattatataaacgcaccaagatttcaaatcaagagagatgaaggtgacggtattgctacgtacggtagagtacactacatttataaagaagagatttcacttaaagaactcgactttaaattgagacagtatttaattcaaaattttgatctgtataaaaagtttcctaaagatagtaagataaaagtgataatgaaagatggcggctattatacgtttgaacttaataaaaaattacaaacaaatcgcatgagtgacgtcattgacggtagaaatattgaaaaaatagaagccaacattagataattcaatgaaatatggataatagtaaaatatggatagtatagaggagttaggcaacataagttgcttagcttcttttttgtgttggagagatgaaaatgaagcgtatcgatgaataataaaaacaccaataaaacttgtggaaatagttgatacttatagtcgcgcgttgtccttttcgtgacatgaaacaatgtggaaaacatagttaaattgagggaaagtgtgaatagttaaaaaagctgcgttaagtttaaaaaatagattaacgctgttaggattccattaattagcttaacattggttcaaaaatagttaaaaagaggttaattcatagcttagtattacgcttatataatgatagtagattgttcgtattacgtaattgaaataatcatataaaaatatattaagacaaaatttataaatagattgggagaatagtactatgaaattaaaaacgttagctaaagcaacattagtattgggattgttagctactggtgtaataacaacagaaagtcaaacagtaaaagcggcagaatcaactcaaggtcaacacaattataaatcgttaaaatactactatagcaagccaagtatagagttaaaaaatcttgatggtttgtatagacagaaagtgacagataaaggagtatatgtttggaaggatcgaaaagattattttgttggcttgcttggtaaagatattgaaaaataccctcaaggtgagcatgataagcaagatgcatttttagtcatcgaggaggaaactgttaatggaagacaatattcaattggtggtttaagtaagacaaatagtaaagaatttagtaaagaagtcgatgttaaagtaacaagaaaaattgatgaatcatcggaaaagtctaaagatagtaaatttaaaattactaaagaagaaatctcgttaaaagagttggactttaaattaagaaaaaaattgatggaagaagaaaaattatatggtgctgttaataatagaaaaggtaaaattgtagttaaaatggaagatgataagttttatactttcgaacttacaaaaaaactacaaccgcatcgcatgggtgacacgatagatggtaccaaaatcaaagaaattaatgttgagctagaatataaataatctttggacaagcagactagtaattgtagggaagttaagcgataacatattgcttagcttcttttttattttgttatgatgaaaaaaggagcgggtttatgatcaagtttttggaaaaacggttgatacttatagtcgcgcgttgtccttttcgtgacatgaaacaatgtggaaaacataattaaattgagggaaagtgtgaatagttaaaaaattagtattgtgttataaaaaataattaatactgttaggatttcattaactaacttaacgttggttcaaaaatagttaaaaagaggttaattcatagcgcagtatctcacttatataatgatagtagattgttcgtattacgtaattgaattaatcatataaaaatatattaagacaaatttataaatagattgggagaatagtactgtgaaattaaaaacgttagctaaagcaacattggcattaggcttattaactactggtgtgattacatcagaaggccaagcagttcaagcaaaagaaaagcaagagagagtacaacatttatatgatattaaagacttacatcgatactactcatcagaaagttttgaattcagtaatattagtggtaaggttgaaaattataacggttctaacgttgtacgctttaaccaagaaaatcaaaatcaccaattattcttattaggtaaagataaagagaaatataaagaaggcattgaaggcaaagatgtctttgtggtaaaagaattaattgatccaaacggtagattatctactgttggtggtgtgactaagaaaaataacaaatcttctgaaactaatacacatttatttgttaataaagtgtatggcggaaatttagatgcatcaattgactcattttcaattaataaagaagaagtttcactgaaagaacttgatttcaaaattagacaacatttagttaaaaattatggtttatataaaggtacgactaaatacggtaagatcactatcaatttgaaagatggagaaaagcaagaaattgatttaggtgataaattgcaattcgagcgcatgggtgatgtgttgaatagtaaggatattaataagattgaagtgactttgaaacaaatttaaagtaagtaatcaatgactctaaagtaataaatttgaagcagcttaacgatgaaatgttgaatagatacgtacaccttacattaaggagcgtatttaaaacaaccttgtcgttaggcttttttttacgttttataacgcaggttatgagtgagcatactaaaaatttacattgctcttgaaagtgatgcccattgaatattaattagctcttcattaacaatgatttaagtttaattaaacgagtgttaatgtcagtctgtctcaatgccctttataataaaggtgtattattcaaattacgtaataaaagcaatccaatatattaagattggagcacatgaatatgaaatttacagtgatagctaaagcgatatttatattaggaatattaacaacaagtgtaatgataacagaaaatcaatcggttaatgcaaaaggaaagtatgaaaaaatgaaccgtttatatgatacaaacaagttacatcaatactattcaggacctagttatgagttaacaaatgttagtggccaaagtcaaggttattatgactctaacgttttgctttttaaccaacaaaatcaaaagttccaagtgtttttattgggaaaagatgaaaataaatacaaagaaaaaacacatggtttagatgtctttgcggtaccagaattagtagatttagatggaagaatatttagtgttagtggtgtaacaaagaaaaacgtaaaatcaatatttgagtctctaagaacgccgaacttactagttaaaaaaatagacgataaagacggtttttctattgatgaatttttctttattcaaaaggaagaagtgtcattgaaggaacttgattttaaaataagaaaactgttgattaaaaaatacaaactgtatgaagggtcagctgataaaggtagaattgttattaatatgaaagatgaaaataagtatgaaattgatttaagtgataaattagatttcgagcgtatggcagatgtcattaatagtgaacaaattaaaaacatcgaagtgaatttgaaataatcaatgatatatatagaatgaaagcttaagaagcggtttaataatcccatgtttaatgattttgatacgtgtttttataataaaaacatatcgaacattgactacgttattaagctgcttttttgtacactttataaccaatagcttaagatttaaaactaatcggaaagaacaatgattcaccaaaaaaatatttatgttgctattaaaaatcagttaatacgaatgttaaaatacgtttgattttcattaataatgattcaagtttatttaaatgagcgttaatgtcagtctgttttgatgcaccttataataaagacagatagttcaaattacgtaataataacaatccaatacattaagattggagcaaaaaaatatgaaattaacaacgatagctaaagcaacattagcattaggaatattaactacaggtgtgtttacagcagaaagtcaaactggtcacgcgaaagtagaacttgatgagacacaacgcaaatattatatcaatatgctacatcaatactattctgaagaaagttttgaaccaacaaacattagtgttaaaagcgaagattactatggctctaacgttttaaactttaaacaacgaaataaagcttttaaagtatttttacttggtgacgataaaaataaatataaagaaaaaacacatggccttgatgtctttgcagtacctgaattaatagatataaaaggtggcatatatagcgttggcggtataacaaagaaaaatgtgagatcagtgtttggatttgtaagtaatccaagtctacaagttaaaaaagttgatgctaaaaatggcttttcgataaacgagttgttttttattcaaaaggaagaagtatcattgaaggaactggactttaaaataagaaaactcttaatcgaaaaatatagattgtataaaggaacgtctgataaaggtagaattgttatcaatatgaaagacgaaaagaagcatgaaattgatttaagtgaaaaattaagttttgaacgtatgtttgatgtaatggatagtaagcaaattaaaaatattgaagtgaatttgaattagttcgagttaatagcataatagcttaagaagcggcttaacgacaaaatgtgaattggcatttgtgtccttatataaggaactgtgttaaatacattactgttgttaagttgtttttgtaattcaaagagcagaacagagtaacatcatcagttgtagtaaacgataatccggtaaaacaactaaatgaaataatgaaagtcatttaacctgaacattaaaatatatttgtttttcattaagaataattcaagtatatttaaatcgaggttaattatcgtatgaaacgatgcacgttataataaaaatgtatgattcaaattacgtaatgaaaacaatccaatatattaagattggagcaaataaatatgaaatttacagcattagcaaaagcgacattagctttaggaattttaacaacaggaactttaacaacagaagttcattcaggtcatgcaaaacaaaatcaaaagtcagtaaataaacatgacaaggaagcattataccgatactacactggaaagactatggaaatgaaaaatattagtgctttgaaacatggtaaaaacaacttacgttttaagtttagaggtattaagattcaagttttactgcctggaaatgataaaagtaaatttcaacagcgtagttatgaggggttagatgttttctttgttcaagaaaaaagagataagcacgatatattttatactgttggtggtgtaatacagaataataaaacatctggagttgtcagtgcaccaatattaaatatttcaaaagaaaagggtgaagatgcttttgtgaaaggttacccttattacattaaaaaagaaaaaataacactaaaagaactggattataagttgagaaagcatctaattgaaaaatacggactttataaaacaatctcaaaagatggtagggtcaaaattagcttgaaagatggcagtttttataaccttgatttaagatctaaattaaaatttaaatatatgggggaagtcatagaaagcaaacaaattaaagatattgaagttaacttaaagtaaatcattacgaataattaaaagtaattgaagcggcttaacggtgaaatgtaaattggtgcgcatagcttatacaaaaaggatgcatcaatcgatatcgtcgttaagccgttttggtttgtgtgtcatgaatcctatcccaatctccataaaggtaaaatttccaccaccaacatcaaaattctccacatcgcaacataaccaaatgttataataaatctattacacaaagagataaattacttattcaaaggcggaggaatcacatgtctattactgaaaaacaacgtcagcaacaagctgaattacataaaaaattatggtcgattgcgaatgatttaagagggaatatggatgcgagtgaattccgtaattacattttaggcttgattttctatcgcttcttatctgaaaaagcggaacaagaatatgcagatgccttgtcaggtgaagacatcacgtatcaagaagcatgggcagacgaagaataccgtgaagacttaaaagcagaattaattgaccaagtcggttacttcattgagccagaagatttattcagtgcgatgattcgtgaaattgaaacgcaagatttcgatatcgaacacctggcgacggcaattcgtaaagttgaaacatcaacattaggtgaagaaagtgaaaatgactttatcggtctgttcagcgatatggatttgagttcaacgcgactaggtaacaatgtcaaagaacgtactgctttaatctctaaagtcatggttaatcttgacgacttaccattcgttcacagtgacatggaaattgatatgttaggtgatgcatatgaattcctaattgggcgctttgcggcgacagcgggtaaaaaagcaggcgagttctatacaccacaacaagtatctaagatactggcgaagattgtcacagacggtaaagataaattacgtcacgtgtatgacccaacatgtggttcaggttcactgttgttacgtgttggtaaagaaacacaagtgtatcgttatttcggtcaagaacgtaacaatactacatacaacttagcacgcatgaatatgttattacatgatgtgcgttatgagaacttcgatatccgtaatgatgacacattggaaaacccagcctttttaggcaatacatttgatgcggttattgcgaacccaccgtatagtgcgaaatggactgcagattcaaagtttgaaaatgacgaacgattcagtggttacggcaaacttgcgcctaagtctaaagcagactttgcctttattcaacacatggtacattacctagacgatgaaggtaccatggccgttgtactcccacatggtgtattattccgaggtgctgcagaaggtgtcattcgtcgttatttaattgaagaaaagaactacttagaagctgtgattggtttgccagcgaatattttctatgggacaagtattccaacatgtattttagtatttaaaaaatgtcgccaacaagacgacaacgtactatttatcgatgcatccaatgattttgaaaaaggaaaaaatcaaaatcatttaagcgatgcccaagtcgaacgtattatagacacatataagcgtaaggaaacaattgataaatatagctacagcgcgacactacaagagattgccgataacgattacaacctaaatataccgagatatgtcgatacattcgaagaagaagcaccgattgatttagatcaagtccaacaagatttgaaaaatatcgataaagaaatcgcagaaattgagcaagaaatcaatgcatacctgaaagaacttggggtgttgaaagatgagtaatacacaaaagaaaaatgtgccagaattgaggttcccagggtttgaaggcgaatgggaagagaagcagttaggggatcttacagatagagtaattaggaaaaataaaaacttagaatcgaaaaagcctttaacaatatccggacagttaggtttaattgatcaaacagaatattttagtaaatcagtttcgtcgaaaaatctagaaaattatacactaataaagaatggagaattcgcgtataacaaaagttattctaatggatacccattaggggctattaaaagattaactagatatgatagtggtgtattgtcctctttgtatatttgtttttctattaaaagtgaaatgtctaaagacttcatggaagcatattttgattcgacacactggtatagagaagtttctggaattgcagttgagggtgcaagaaatcacggattattaaatgtttctgtgaatgatttttttactattctaattaaatatccaagtttagaagaacagcaaaaaataggcaagttcttcagcaaactcgaccgacaaattgaattagaagaacaaaagcttgaattacttcaacaacagaaaaaaggctatatgcagaaaattttctcacaggaactgcgattcaaagatgagaatggtgaagattatccagattgggaaaatagcaaaatagaaaaatatttaaaagagagaaacgaacgttctgacaaagggcaaatgctttcagtaactataaatagtggcattataaaatttagtgaattggatagaaaagataattcaagtaaagataaaagtaattataaagtagttaggaaaaatgatattgcatataattctatgagaatgtggcaaggggctagtggtaaatcaaattataatgggattgttagccctgcatatactgtgctttatccaacacaaaatactagctcattatttattggatataagtttaaaacacatagaatgattcataaatttaaaattaattcacaaggattaacatcagatacatggaacttaaaatataaacaattaaaaaatataaatatagatatacctgtattggaggaacaagaaaagataggtgatttctttaaaaaaatggatatattgataagtaaacagaaaatgaaaattgaaatattagaaaaagagaaacaatcctttttacaaaaaatgttcttataactttgataaatacatagattgcataagaataaaatttgtataatttaacataaaagttgtaaaagtaaagtgaattaaaaacgaacattaaatttaggcactgtgaaagcgcagtgtcttttttgtgtcgaaattgtgtacagaataagtagttaaataaagattaagttgagataaagtgttattcgtaaataaaagagagtagatcgataggaattgaatgatattagttaactatttattaaattacttaataatgattaatttttagttaaagtaagtttaatgtgaagcacgaccattgctcattataatgaatgaggattgttcgtattgcgtaatagaataaatcaaatagactaaaaattgggagcatagaattatgaaattaaaaaatattgctaaagcaagtttagcactagggattttaacaacagggatgattacaactactgctcagccagtaaaagcaagtacattagaggttagatcacaagctactcaagacttgagtgaatattataatagaccgttctttgagtatacaaatcagtcaggatataaagaggaaggaaaagtgacgtttactcctaattatcaacttatagatgtaactttaactgggaatgaaaagcaaaattttggtgaagatatttctaatgtagatatatttgttgtaagagaaaattctgatagatctggtaatacagcttcaattggtggtattactaaaacaaacggttcaaattatattgataaagtaaaagatgtaaatttaataattactaaaaacatcgatagtgttacatcaacgtcaacatcatctacatatacaattaataaagaagaaatttcattaaaagaacttgattttaaattaagaaagcatttaattgataaacataacctttataagacagaacctaaagacagtaaaattcgaattactatgaaagatggtgggttctacacatttgaattgaataaaaagttacaaacacaccgtatgggtgatgttattgatggcagaaatatagaaaaaattgaagtgaatttataaaattattcgagggagcatatcatgagggaaaattttaagttacgtaaaatgaaagtcggtttagtatctgttgcaattacaatgttatatattatgacaaacggacaagcagaagcatctgaaaatcaaaacgctttaatctctaatataaatgtagacaatcaggaaaaacagaataatgtaaatcaagctgttcagcctcaaaataatactaatgaaacatcaaaagtaccggctaattttgtcaaattgaatgatattaaaccaggtgatacttctatacaaggaacaactttaccaaatcaatttatactattaactattgataaaaaagatgtgagctcagttgaagattctgacagcagctttgttatgtctgataaagatgggaattttaagtatgacttaaatggtcgcaaaattgttcataatcaagaaattgaagtgtcttcatcagatccctatttaggtgacgatgaagaagatgaagaagtagaagaaacttcaactgaagaagttggtgctgaggaagaaagtacagaagctaaagctacatatacaacaccgcgatatgaaaaagcgtatgaaataccgaaagaacagctaaaagaaaaagatggacatcaccaagtttttatcgaacctattactgaaggttcaggtattattaaaggccatacctctgtaaaaggtaaagttgctctatctattaataataaatttattaactttgagacaaatgctaatggtggtccaaataaagaagaagcgaaatctggatcagaaggaatctggatgcctattgatgacaaaggatactttaattttgacttcaaaacgaaacgtttcgatgatttagagttaaagaaaaatgatgagatctcattaacatttgcacctgatgacgaagatgaggcattgaagtcattaattttcaaaactaaggtaacgagtttagaagatattgataaagcagaaactaaatatgaccatactaaagtggaaaaagtaaaagtattgaaagatgttaaagaagatttacatgtagatgaaatttacggaagcttatatcatacagaaaaaggtaaaggtattcttgataaagaaggtactaaagtaattaaaggtaagactaaattcgcaaatgcagttgtgaaggtagactctgaactaggtgaaggtcaagaattccctgatttgcaagtcgatgaaaaaggtgaattcagctttgatgtagatcatgctggatttagattacaaaatggagaaacactaaacttcacagtagttgatcctattacaggtgaattattaagtggaaattttgtttctaaaaacatagatatttatgaatctcctgaagaaaaagcagatcgtgagtttgatgaaagaatggaaaacacacctgcatatcataaattacatggtgataaaattgtcggctacgatactaacggattcccgattacctggttttatccattaggtgaaaagaaagttgaacgtaaggcaccaaaattagaaaaataattaaataaaacagcttaatgatgtaatgaaattagtgagttaatcactgacttctacgtcattgagctgtttttttgtgctttgttacaaagcattattgaatttattttacgtgttcatattttgaaacatcaaagccgtcttgtttagctttgttgataatgtctttgattgaatgtagtcctttatcggcgaagtatgatcttaagttgtcttttgtagcttggtcagcattcttatctaataacacatcaatataacttaattcatgttctaagaagtttgcatcatcatgtagtacgagtccattttgagaataaactttcgcatctgcttgattaccatatccaacaacgccagttgctaaaacacctaccattgccgtagctactaaaacctttttaaatttcatatctatcactcctctaaaaattgtaactccatcataacactgaatattaagaaaattacgtttattaagtcgatttaataatttttaataaatagttaaagtgacaaatattgtttaaatgcaattaatctttaatacgatgcttgaggatttttcctaataaaaccttgatttcaaaaagggtttaaatcaaatgaaacaataataaaaaaatgacgcaatataataataagtacaaatttaattaagaaattaaattgattgtatatgtatattttggtaacgtaaaagagaaatatacaaaataattaattatttatatgaaaagagaatataaatgaagtataaaacagagagacgtgaagcgatgggatatttaaaaaggtttgcattgtacataagcgttatgattttaatatttgcgatagcaggttgtggcaaaggtaatgaaacaaaagaagattcaaaggaagaacaaatcaaaaagagctttgcgaaaacattagatatgtatccaattaagaatctcgaggacttatatgacaaagaaggatatcgagatagcgaatttaaaaaaggtgacaaagggatgtggacgatatatacagatttcgccaaaagtaataaaccgggtgaattggatgatgaaggtatggttttaaatctggataggaatactagaaccgctaaaggccattattttgttactacattttaccggaatggtaaactaccagatgaaaagaattataaaattgaaatgaaaaataataagattattttattagatgaagtaaaagatgataagctcaagcagaaaatagaaaactttaaatttttcggtcaatatgccgatttcaagagtttgaaaagttacaacaatggcgacgtttcaattaatagtaatgttccaagttatgacgcgaaatttaaaatgagtaataaagatgaaaatgttaagcaattaagaagtcgttataacattcctactgaaaaagctccaatattaaaaatgcatattgatggggacttaaaaggcagttccgttggatataaaaagttagaaatagacttttcaaaagaagaaaatagcgaattatcagtagtcgattcattaaattttcagcctgccaaaaaaaataaagatgatgaatgatagggaggatgtgaaacaatgtggtcaataaaaagaattggaatgtacacaaatgttataattttgagcgtttttataataggttgtgatagttcaagcaataatgcagaaaatcaaagagaagactcaaaagaagaacaaatcaaaaagagctttgcgaaaacgttagatatgtaccctattaagaatctcgaggatttatatgacaaagaaggatatcgtgatggtgagtttgaaaaaggcgataaggggacgtgggtattgtattcagctatggtatcacaaccaaaaggcgagagtttaaaatcacgaggaatgatattaaagttagatagaaataagagaactgctaaaggaagttatattattagagaattgaaagaagataaaaatcatgatgttcaaaaaaatgaaaagaaatatccagtgaaattggtgaataataggatagttttgataaaagatgttaaagacaaaaagttaaaaaaatgaaatagagtcgtttgaattattttcacaatatggaaactttaatcattttgatcggaatgagattactaatatttcatataatcctaatgctcccaattactctgcagaatataaaatgaagaaaaatgacagaaacattcaacagttgaaaaagagatttaatctaaaaactagcaagacaccaaaattattgtttaagggatctggagatataaaggggtcttctgtaggatataaggaaatagaaatcatatttagtagaagtaaagaagaaagcatttattatgttgacagcgttgagttcgttccaagtaacaaaataacaaaaagttgatattagtcaacaaaagcaaatattgagaataaagagagttgtgaaatgatgggttatttaaaaagacttgtattgtatatagttattatggttatgagtgtttttataataggttgtgataaatcaagcgatactgcagaaaaatcaaaagaagactcgaaagaaacacaaatcaaaaagagttttgcgaaaacgttagatatgtattcaattaagaatctcgaggaactatatgacaaagaaggctatcgagatggcgaatttgaaaaaggtgacaaagggatgtggacgatatatacagatttcgccaaaagtaataaaccgggtgaactaagtaatgaaggcatggtcttgtacttagatagaaacacacgcacagctaaggggtactactttgtcaggacgttttatcgcaaggataaattacctgatagaaaaaattataaagttgaaatgaaaaataataaaatcattttattagataaagtagaagataaaaagcttaaacaaaaaatagaaaattttaaatttttcagtcaatatgcaaatcttaaagaattgaaaaactacagcaatggtgatgtctcaattaatgagaatgttccaagttatgacgtgaaatataaaatgagtaataaagatgaaaatgttaagcaattaagaagtcgttataatattcctactgataaatcaccggtattaaaaatgcatattgatggtaatttgaaaggaagttccgttggagataggaagttagaaattgatttttcgaaacgtgaaaatagccatttatcagtaatagattctttggattaccagccagcgaaaactaataaagatgatgaataatgaggatggtgtgtaacaatgaagtctataaaaaggattggattgtgcataagtctgttgattttaagcatttttgtaacatcttgcgatggtgataataagatcactggagattcaaaagaaacacaaatcaaaaagagcttttcgaaaacgttagatatgtatccaattaagaatctcgaggacttatatgataaagaaggataccgtgatggcgaatttaaaaagggcgacaaaggaatgtggactatatatacagattttgctaaaggcaataaatcagacgaattggatgatgaaggtatggttttaaatctggatagaaatactcgaacggctaagggatattattttgttaagaaattttatgaaaaggataaattacctgatagaaaaaattataaagttgaaatgaaaaataataaaattatcttattagacaaggtagaagatccaaatctaaaaaagagaatagaaaactttaaatttttcggacaatatgcaaattttaaggatttggaaaattacaacaatggcgacgtgtcaataaattggaatgttccaagttatgacgtggaatataaaatgagcaataaagatgaaaatgttaaacaattaagaagtcgttataacattcctactgataaagctccaatgttaaaaatgcatattgacggggacttaaaaggtagttctgttggatataaaaggttagaaatagatttttcaaaagaaggtagggatatttcagtcattgattatttaagttataagccagcgaaaaaatagtactgataattaaatattagggtgtgaaggaatggaatatctaaaaaggcttgcattgttaataagtgttattattttgaccatttttataatgggttgtgatagtcaaagcgatactgcagaaaatccaaaagaaggttcaaaagaagcacaaattaaaaagagtttttcgaaaacgttagatatgtatccaattaagaatctcgaggatttttatggcaaagaaggatatcgagatggcgaatttaaaaaagatgataaaggtacttggctaattagatccgaaatagttaaacagccaaagggcaaagtgatgaaaacaagaggtatgcaattatatattaatagaaataccgaaacagccaaaggtttctttgttttgaaagaaataagtgaaaataataatcgtgtaaataaagataaggaggaaaaatacgaagtgaaaatggtaggaaataaaattattcctactgaacaaattaatgacgagaaaataaaaaaagaaattgaaaacttcaagttttttgtgcaatatggaaactttaaaaatttcgaaaaatacaacaatggtgagttttcatataatcctgaagcaccaatttattcggctaaatatcaattacacaacgatgattacaatgtaaggcaactacgtaaaagatatgacatttcaacaaaagaaacaccgaagttacttttgaaaggtggaggagatttaaaaaattcctcagttggtcaaaacgatattgaatttacttttgttgaaagaaaaggtgagaatatttattttaacgatagtgttgaattcataccaagtaagtaaagttaaattaaaatgtgtggttagatgaaatgatcaaatatcaaaaaatgtgcaaagagatgtgacaagatgaagtgttttcagaaattatacatatttatattaattttaatcgtattaatggcaggatgcgaaagtaataagatcactggagattcgaaagaaacacagatcaaaaagagctttgcgaaaacattagatgtataccctacgaaaaatctagaagatttttatgacaaagaaggatatcgagatggcgaatttaaaaagggtgacaaagggaagtgggttattagatctgaaatgacaacagaactgaaaaatgaaaatatggtatctaaaggtatggtcatacgtttaaatagaaatagtagaacatgcactggtgaatattttgtcaggatagttaaagaagacagtgagggcaaggtatatagtgatgaacgaaaatatccagtgaaaatggaaaataataaaatcattacattaaaaccaatcgatgatgaaaaagtaaaaaaagaaattgaagaatttaaattcttcgtacaatacgggaatttcaaagaattggaaaactataaagacggagaagtgacatataacccagaagcaccaatatactctgcacaatatcaattgaaaaatagtgattataatgtagaacaactacgtaagcgatataatataacgacgaaaaaagcgcctaaattattattgaagggttcaggtaatttaaaaggctcatcagttggatataaaaatattgaatttacctttgttgaaaataaggaagaaaatatttacttcacagatagtattaatttcaagtcaagtccagactcctgtgtaaaatgctatacaatgtttttaccatttctacttatcaaaattgatgtattttcttgaagaataaatccattcatcatgtaggtccataagaacggctccaattaagcgattggctgatgtttgattggggaagatgcgaataatcttttctcttctgcgtacttcttgattcagtcgttcaattagatttggtactctttagtcgattgtgggaatttccttgtacggtatattgaaaggcgtcttcgaatccatcatccaatgatgcgcaagcttttgagtattttggttgatcgatataatcatgaatcaaatcgatttttagcctcacgcgctaagttaatatctgtgaactttaaaaattcctttaacagcttctctgaaagtattttgaattttttttaggaatggtggtaaagatatttcttaggaagtgaacttggcattctttgccaacttacgttggtgaaggattttctaatggcagagactaatcctttgtgcgcatcagaaataacgagttccgtaccttgtaaaccgcgttcttttaggtattcaaaaaatgttgtccaggtctcttcgctttcgccactttgaatcatgaagccgataatttcacggtcgccatctttggttattccaatcgctatatgacagctttttgagagtactcgattttcttctcgtacttttatatagagtacatcggtcattaagtaaggataatttttttctgataataaacgattctgccactcgttaaccataggttctagctgttctgttaagctagaaacgaaggacttagagacggatttaccacaaagttcttccacaatttttgatactttacgagttgaaacgcctgatacatacatttccaacattgaagccatgagggctttttcgtttcgttgataacgttcaaacactgtgggtgaaaaatggccatcacgtgttctgggtacttttaattctagcgtgcctacacgtgtcgtaaagctgcgctcataatagccatttcgttgactttgtcggttttctgttcgttcatattcttttgcttgaatatattctgttcgttgattttccattagttgattaaataccgttgttaaaatatttttagaaacgtcatcctttacagaatattcaataatgctttgaatctcttcgcttttcagtgtaaaatgtacttgggtcatgtaaaagtcctcctgggtatgtttttgtcgttaaaaacattgtaccgtaaaaggactgttatatggcctttttacttttacacaattatacggactttatcataatagtcaagtccagactcctgtgtaaaatgctatacaatgtttttaccatttctacttatcaaaattgatgtattttcttgaagaataaatccattcatcatgtaggtccataagaacggctccaattaagcgattggctgatgtttgattggggaagatgcgaataatcttttctcttctgcgtacttcttgattcagtcgttcaattagattggtactctttagtcgattgtgggaatttccttgtacggtatattgaaaggcgtcttcgaatccatcatccaatgatgcgcaagcttttgaatattttggttgatcgatataatcatgaatcaatcgatttttagcctcacgcgctaagttaatatctgtgaacttaaaaattcctttaacagcttctctgaaagattttgaattttttttaggaatggtggtaaagatatttcttaggaagtgaacttggcatctttgccaacttacgttggtgaaggattttctaatggcagagactaatcctttgtgcgcatcagaaataacgagttccgtaccttgtaaaccgcgttcttttaggtattcaaaaaatgttgtccaggtctcttcgctttcgccactttgaatcatgaagccgataatttcacggtcgccatctttggttattccaatcgctatatgacagctttttgagagtactcgattttcttctcgtacttttatatagagtacatcggtcattaagtaaggataatttttttctgataataaacgattctgccactcgttaaccataggttctagctgttctgttaagctagaaacgaaggacttagagacggatttaccacaaagttcttccacaatttttgatactttacgagttgaaacgcctgatacatacatttccaacattgaagccatgagggctttttcgtttcgttgataacgttcaaacactgtgggtgaaaaatggccatcacgtgttctgggtacttttaattctagcgtgcctacacgtgtcgtaaagctgcgctcataatagccatttcgttgactttgtcggttttctgttcgttcatattcttttgcttgaatatattctgttcgttgattttccattagttgattaaataccgttgttaaaatatttttagaaacgtcatcctttacagaatattcaataatgctttgaatctcttcgcttttcagtgtaaaatgtacttgggtcatgtaaaagtcctcctgggtatgtttttgtcgttaaaaacattgtaccgtaaaaggactgttatatggcctttttacttttacacaattatacggactttatctgaataatcactattttaataagttgtatgaaatattcaaatgtttataaaattaaaacagagagatgtgaaatgatggagtatataaaaaaaattgctttgtacatgagtgtattacttttaatcatttttattgggggatgtggaaatatgaaagatgaacagaaaaaagaggaacaaacgaataaaacagattcaaaagaagaacaaatcaaaaagagttttgcgaaaacgttagatatgtatccaattaagaatctcgaggatttatacgacaaagaaggatatcgagatggtgagtttaaaaaaggcgataaaggtacgtggactatacttacaggtttttcaaaaagtaacaaaccaggagtattagatgatgaaggcatggtgttatatcttaatagaaatgccaaaaaggcaacaggttattattttgtaaataaagtttatgatgatattagcaaaaatcataatgagaaaaaatatcgtgttgaactaaaaaataataagattgttcttttggataatgtagaagacaaaaaacttaaacaaaaaattgaaaattttaaattttttagtcagtatgctgattttaaagatttaaaaaattatcaagatggaaatataacaactaatgaaaacgtaccgagctatgaagcacaatataaaatgaacaatagtgataaaaatgtaaaaaaacttagagaaatttatccaattacaactaataactctccaaatctaaaattatatatagatggtgatataaaaggaagctcagtaggatataaaaaaatagaatataaattttcaaaagataaaggtcaagagacaacattaagagattatttgaattttggaccgtctgaaggtgagaatgttgagtaggaagtataaaatagatttaaaagcaattaatcaaaatactgagtctacaagtgctatttcgaaagcgtcatacgaagttgagaatgctaataataatggtctatcaaaaagagacgtgattaatcaatttaatgatttgaaaaaaatgaaaaaattcccttctaatcttgaatatgttgatagttacactgattctcttactggagtaacaacttctgcttttttaaataaagatacaggcaaagtaactctcgggatgactgggactaatttacaagacgaagcctttaaaaagttaaaagaaggtgaattttcaagacaaaatgttaccaatgctttggaaacagttaaagatggatatgcagatcttaaaatattatattctcctgcatctgatcaaaactatagatatgcgaatacacaagaatttataaataaaataaaaagtaagtatgacattgattttattactggacattcactaggtggaagagatgcggtagttctaggaatgagtaatggtattccgaacattgtggtttataatccagctcctatttctataactagtttgaatcctaattccccagatggaaaacgtttattagaattatataaaaattataaaggtaatattactaggtttgttgcagaaaatgatgcattgacagaaaatctgaagaaatataagcattatgtttttttcggtaatgataaagtctttaaaaatggtaaaggtcatgaaatggaaggatttctgaccgaagaagaacaaaaagctataaaaaaagaacttaaaaaactacaaggttatgcagaagaaaataataagtcatttgtaaagaattcaaataatgctatctctaaattagctagtatagaattacttagagcaaatatgatgactacaaatggaggaggattatcttcttcgcagcaaaaagttttagaaagtttaacagctttaacaattgcgcagtcattcagtcaactgatagacgatgaaattaatcaaatcaaaaaaatgtataatgaaaagaaaaagaaatttggaaaaaattgggaagacgctcaaaaagctggaaaagctgtaggtgaagatttgagtgtaaatggagttctcaatgctttagatgaaggtcaagtgaatgaaagtagtatggtaagagaacctgaacaaatgatatctgcaaaagaaagacaactttcaacgatagggtcttctgtatcaaattatattatgagagttagactcagtattaatgaaatcgttgataaagatcaagtgcttgcatcacaaataggtggattactatgatgtttaatcaaattaataataaaaatgaattagaagaatcatatgaatctgagaaaaaacgtatagagaatgaactgcaaaatttaaatgaacttaggcatagaactcgaaaagaaaatgagcgtagttatgatgtttttcaatatttgaagcacgaaatgaattatagtgaagatgcccaaaggaaaatgacgagaaatatagaagcgtatgagcaagaaatcaatgagataattagaaagcaagaatggaaattagaagaatataaagaagacttaaaaaagtcttatgaaaagcagttagataagctaagtgactgataatttggaggagattaaatgactctaatagaaccagatatgaccttaagaatgccagatataagtactacagtagaaacacttaatctcatatctaaaatggaagcgcaaaaagaaaatattcgcacagttattgcacctgaacataagcataaatacaaagatattgaaaacggattaaaaggtgaagaaaaagtattaattgaacaaatggcgcaacattgcgaagcttttaaagctaattttaaaggtgcagctcaaggagattgggttaaaagtgccatgtctgagatagacagcattaaggatgacctgaaaaaaattaatagctaaactacatatcatactactaaataaagcgaccaatgttcagtatattcacaactgacactaggccgcttctttttaatttatattattcccatgtaaagtaattcgaaccgaatcgaaatatcacactctcaattgtaaaaaaacaacttaaattactgtcccgcattaaacatgaccacattcgtaacagcaacaataaaaatcctcaagtactaaaagctatgatcactttatcaaaatcaacgcaagttaacctctcccgaactacccgttactcatcaccttcaccttacaaaccataaagcgctgcagttaagtattgaatggcatagccaattgaaatgaaaatagcaatcgttataatagcactgccaatggtatataaagtatgtttcgtagataatccttcagtctttgaaccaaaaacactgagtagaataaatgcaataccagtaacatataaaactaaaatgacaaataacatgtttatacacctcgattctctttcgtgagatatatctttgtctccattataaagtaaagcgctcaataatttaattaagtatactatttttttattatcgaagattgcgaaagaggaaacgctcctatataatgtaaaacggaattattcctatttacaaataaattgaagtgagggtatatatatggctaaaattccagttacggtattaagtggttatttaggctcggggaagacaacgttgttaaatcatattttacaaaatcgagaaggtcgacgtatcgcggtaattgtaaatgatatgagtgaagtaaatatcgataaagatcttgtcgcagatggtgggggactatcgcgtacagatgaaaaattagtcgaactttctaatggttgtatctgttgtacacttagagacgatttattaaaagaagttgagcgtttagtgaaaaaaggtggcatcgatcaaattgttattgagtcaacagggatttcagagccagtacctgttgcacaaactttctcatatattgatgatgaacttggcattgatcttacagcgatttgccgtttagatacaatggttacagttgtggatgctaaccgcttcgtacatgacatcaactcagaagatttattgatggatcgtgatcaaagcgttgacgaaacagatgagcgttcgattgctgatttattaattgaccaagttgaattttgtgatgtattgattattaataaaattgatttaattagtgaagaagaactagcgaagttagaaaaaatgttaagcgcattgcaaccgactgctaaaattattaagacaacaaattctgaagtagatttaaaagaagtcttgaatacgcagcgttttgattttgaaaaagcgagcgagtcagcaggatggatcaaagaacttgagtctggtgggcatgcatcgcatacacctgaaacagaagaatatggtatatcatcgtttgtatataaacgtcgtctacctttccatgctaaaaggttcaatgattggttagaaagcatgccaaataatgtcgttcgatcaaaaggtatcgtatggctagcacaatacaatcacgtagcatgtttattatctcaagcagggtcatcttgcaatattcatccagttacatattgggtggctagtatgtctgaagcgcaacaaacacaaatattagcagaacgtcaagatgtcgcagctgaatgggatccagaatatggcgatcgtcatacacaatttgtcattattggtacagaattagatgaagaaaaattaacaaaagaactcgacgcatgcttagtcaatgcgcaagaaattgatgcagattggcaacaatttgaagatccatatcaatggcaaattagaccagcacgataagttgaatgaagtataatcatttttgaattgtggcttaattgtttgcaatttatgacaattaataaaaagttaaggtgttcttaggatctttttgttttcaatctatctaaagtgtgatagttttgataaagcagaaatttgcattttatccatagggctaagacatgtatgtgtcttagtcctttttatatttacgttgatgaaaaatggcaaaaccatcgtaccaactgttaattgaaggtacaatcattgtttaacagtcataaaaatgagtgaagtaaatgcagctatcaatgtactattaacacttacggtcacacgagtgtttcagtctaaacgtgcaacgcaattccgcacgtggccaatatatcttgcgctagatcatgaaaatcattaagatttcgcatgccaaatcatgaatgtctcagaactcgagtatcaaacataaaacacgccacaaaaatataacgcgtcagactacaaagatcacgaatattccgtatgtcccactaagaacgtcctatacaaaaaacaccaagaccatttatttgcaacaaactaacaagactcacctcacatcaataaatcaacacaaagcaaagccaccatccctattggtatagtggcctgagaattttaagtattcaattcgcttaaattattttgcgaaaatgtcgataattgctttgatgattttaatgatagtacctacaatagccatcgttttgtcctcctgtatgttgatttaacatagtgatgagttgttgatcgttaatgtttgagattagttgttacctaaaaatttaccaagtaaatctttaaagaatttgaataattttgctacgaattccatgtgaatgtcccccttcaaataagatgttcatatctatgagatttttataacttacttaccagtgaatttctcaattaatcctttaatgaatttaatgattcctgcaatgatacccatgtgaaagacctcctttgtttgttatgaaatcttatttaccagtgaattgttcgattaagcttttgataactttaatgatgccagcgatgatacccattaagattacctcctttgcttatgagttaacttcattgtacatagttatcttgtgcgtaattgatttttttcctaacttgaattgttatgatcataactgcgaattttttattttaaaaggacgggaaatactgcctaactgtacaggtgcatttacaaaatctttacaatcattggtttaatagaggttaagctcatgaatttgacatgaagcagaaatttaattatattttatgttataagtttaaaacgaataacacgttaggtctcgtctaggcaaagcatatttatgaagatgaattgaacagacagaagtaacattttatatacatatgtgcatgggagcacgcttaaagagaacactgcaacaaggtatatcaacgtaccgtgatgcagtgtctagttaaactgaaacctgcaatagtaaattttctgccattatgtacagaatctactattgtaggtttttatttttatacataagcaattatgcgagagattagaaataaggaggttatgcagtgttaagttttcaattgctattttcactgtttgttattgcgcttatcattgcattgataagtggcttgttgtttttagcaccagttatgccaatgagatatattaaattacatttatacatactagtcatgccagtattatttgcagtcattggctttttcggtattcatggtcaacatgtcttaggtccatttaaaatagatcgtttatcttggttattagctggctttgtaatggcgcttggctttattattcaaaagttttcaatgcgatatttactaggtgatcatcattatagacattactttccattgttcactgcgattacgtcgtttgcatctttagcatggatgtctgaagacttaagactgatggcactctgctggggtattacattattatgtttaacattgctgatgaacgttaatcgtttttggaaagtgccacgtgagtctgcgaaattatcaagcatgacatttttatgtggttggcttgcattcgttggagcaattgtaactatttatattgcgactggcgagtggcgggtaccacaacatatagttcatccgacatggtcattgttgacgaatgtactacttgtattagctgtcatgataccggcagcacaatttccttttcatcgatggttgattgaatctgtaacggcaccaacgccagtatcggcaattatgcatgcaggaattgtgaatgcaggtggtgttattctaactcgttttgcgccgatatttgataatggatttgcgttatcattattacttatcctttctagtatttctgtattgttaggatcgggtattagcttagttcaagttgactataaacgccaattagtgggctctacgatgagtcaaatgggctttatgttagttcaatgtgcattgggtgtatattcagcagcgattattcatttaatattgcacggtatttttaaagcaacattatttttacaatcaggttctatcgtgaagcgattcaatattccaaaacaagcatctgctaaagacgcttatggctggattgtcatgggacgtgtattagctattatcgtggcatttctattttggatgagtagtgacagaagtgcatatgaagtgttaagtgcactcattctaggatggtcattacttgtatcttggaatcaaatggtagcctttagtaaaggacgcatggcacgtcttgttggtatgattttgattgcaatcgtgacatttatctacgtcatcacacataattatttttacgctgtattacaaaatataacaacacatgcgacaacgccgcctacagtgagtgtcatcattagtgttgttattttaatctttggcagtttattaagtatttgggtggcgcggcatcgatactctaaggcttttgcggtattgtacgtgtggttagttaatctaggtgaagcacgctcgaaagcgatagaaagtcatccgaattatttgaagaagtatttataggaggtgaaaggtatgacaacacagttaaatatcaattcagtcattgaaaatgcgaaacgtgttattacaccattatcaccaatttcgatttttgcagcacgaaatccatgggaaggattagaagcggatacgtttgaagatgtcgcaaaatggttacgtgatgttcgagatgtggatattttcccaaataaagcattaatagaaagcgctgtggcacgtggtgaattagatgaaagtgtctttaatcaacttgttactgatatgttacttgaacatcactacaatatcccgcaacactacatcaatctttatattgataacattaaaacattaaaagacgtacctgcatcatatatgaatcattcaaatgttgatgttgttgctgatctactattagaaaaatcaaaacgtgatatggctgaatcatatcatcactatgatgtacgtccgatgagtgatgcaataatagatgaacaaggtgagccacttagcgaacaagtgaatcgtcaaatgattaaatggacgaaactttatatcgatcaatttctatcgagttggacaatgccgaagcgtgagcaaagtttttaccatgcatggttgcatttagcgcaacatgaccatagttttactaaagcacagcgccaagtgattaaaggcttacccaatgatcctgaaatgacgatagagtcagtattaactcatttttcaatagatcaggaagactaccaagcttatgttgaaggacatcttttggcgttaccgggttgggcaggtatgttgtattaccgttcacaacagcatcactttgaacaacatttgttaacggattatttggcaattcggttagttgtcgaacaattgctagttggtgatgagtttaagtcagtcgctaaagattgtgaaagtagatcggaaaattggtttaagcaaactgttgcatcatggtgttactacagtgatatgcctagcgatgtattactacaacatgacgtcaatgaaattcaaacgtttattcattttgcagcaactatgaataaaaatgtatttaaaaatttatggctaattgcctgggaaatgacatacgaatctcagttaaaacaaaaaattaaagcaggtcatgaaagtgtggcgggcgcattagatgtaaaccaagtaaatgtctcagaaaatgataacgctaatcagccacattcagtattgttaaatgacacacaagcagttgatgaaaataatagcgagctaaatcagatgggcacatcaacgaaagcgcaaattgcattttgtatagatgttcgttcagaaccatttcgtagacatatcgaagcagcagggccctttgaaacgattggtattgcaggcttctttggattacctattcaaaaagatgccgtagacgaacaattcaaacatgattcattacctgtcatggtaccgccggcatatcgcattaaagaatttgcagaccgctacgatatgaatgtttatcgacaacagcaacagacaatgtcatcgatgttttacacatttaaattgatgaaaaataatgtcatgcctagtctgttattgcctgaattaagtgggccatttttaagcttaagtaccattgtcaattcgattatgcctagaaaaagtcgcgcgtctttacaaaaaataaaacaaaagtggttgaaaaagcctgaaacaaagttgacgattgatcgtgagtttgaccgaacatcagacttacctgttggatttactgagcaagagcaaattgatttcgcgttacaagcgttgaaattgatggatttaaccgaagcatttgcgccgttcgttgtgttagcaggtcatgctagtcattctcacaataatccacatcatgcatcacttgaatgtggggcttgtggtggcgcatcaagcggttttaatgctaagttattagcgatgatatgtaatcgtccaaatgtcagacaaggattaaaacaatcaggtgtgtatattccagagacaactgtttttgcggtagcagaacatcatacgtctactgatacgttggcatgggtatatgtgccagacacattatcttctattgctttagatgcatatgaatcattgaatgacgcgatgccgatgatttctgaacacgcgaatcgcgaacgtttggacaaactgccaacgattggtcgtgtgaatcatccagtggaagaagcgcagcggtttgcgagtgattggagtgaggtacgtccagaatggggattggctaaaaatgcatcatttataattggacgacgccaattaacaaaaggcattgatttagaagggcggacatttttacacaattatgattggcgtaaagataaagatggcacattattaaataccatcatttctggtccggcacttgtggcacaatggattaatttacaatattatgcgtcgacagttgcgccgcatttttacggaagtgggaataaagcgacacaaaccgtcacgtcaggtgttggtgtcatgcaaggtaatgcgagtgatctgatgtatggcttatcatggcaatctgttatggctgctgatcggacgatgtatcattcgccaattcgtttacttgtcgttattcaggcacccgactatgttgtagcaagactactcgcgaataatgagcatttcgctaggaaggtgtctaatcattggctgcgtttaatgagcgttaatgaggaagggcgttttaaaagttggatttaacgatgatatgttgcgatgctaagtaactaatatatcatcatatctacaatgttctagcttcttaaaatatactaaaaatgataaacttaatgtaatagttgatgtcgtgataacgatacaaagatgaagtaatcaattttaatattattggagttagtgatatgaaaagaacgaaaggtgaaatcgaagctgaaatcagtaaagccattacgcaatgggaaaaagatttccttggcagaggttccttgtcagttaaatcagacattttaagagatatggtgattattagtttacaaggtatcttaacgccagctgaatatcgtgtatgtagtacgaatgaaggattattaaatattaaacgaacacgttctgaattagttgaatccggtgagcaagatttgaatgatatcatttttaaaattacaggtatcaaagtgatgagcttccatagtgatttaagtacagttacaggtgaacgtattatcgtattcaaacttgaggataatttggaaaagcatatttaagaaggttaggtatgcttctgctggcttattaaagctatagaagtatgcttggttaaacagcgcaacgccatatatttgggtgtgctgtttttctattacatgatgtgtttattacgtggatgaatgcgtgggtctgaatatagcccgtgaaaggcgtatgtcataaaatttgcgaatggtgacaagtcgacgcaagcatatttgttgcgagacatgcccactatccttttacataaagagtatatgtgtgacgtaggcatataatcgataaagtattcctaaaaaattaggtataatgaccattgttgcaataagtttttcggccttgaaaccgataacgcatagtataataggaataaaatataatacaaatatccagtaaatcaaatttgaaaatgatggatgaataggggtaaagaatctaactaatgtaatgattaacgctatatagacaaaaataactctattgatacgccttaccccctctgtataataaatataaatcgtactaaattgaaaatagcaaaatattgttatttcaattatacaatgttttatttgcaatatacataacaatatgaactttataattttgatattgtcggtaaagtgaaatttgtggcacattgatattatggataacatttgtaaaatgaaaatgatgatacgaggagattgtaagatgatagataaaaaattaacatcaccgaaaatgacagtgcctttatttttaatcgcgctgattgtatttataggtatgttttacagtgtagtgacaaatcaagaatggcttaaaaatatagatatgggatcattaacatggtttacagattatttcggtgagccacaacgtcagtatgttaacaatttgtttaattactatatgacgtttagtgcggaaattggagatgtcaaaggtgtcgtgttgatttccattatcgtcacaatcatactgtttattaaacagaggcatttagcggtttggtttgtgacatatttggtttcaggtgtcatcatgaacaaattaattaaagatactgtattacgtccaagaccatataatcatttagccgttgatacaggcttttcatttccgagtggacattccaacgccagcacattattatatttcgccttaatgatcattattatttcacttgctgctaagacaataacaaaagtgttgagtgcgttggttatgggaatattatggcttagcatattattttgtcgcctttattttcatgcacattacttttcagatgtcattggcggcacgtcactagcaatcatttgggtagcgttattcttaatggtatacccatactttattaatcatcgacgacaacgcgtttagcaaacatctttagacatagtggaggtatatagaaaaatgagaattaaaacaccgagtccatcgtatttaaaaggcacaaatggacatgcgatattattattacattcatttacaggtacaaatcgggatgtgaagcatcttgcagctgagttaaatgaccaaggatttagttgttatgcaccgaattatccaggtcatggtttattgttgaaagatttcatgacatataatgtagatgattggtgggaagaagttgagaaagcttaccaatttttagtcaatgaaggttatgaatctatcagtgcaacgggtgtgtctttaggtggattaatgacattaaaattggcgcaacactatcctttgaaacgtatcgctgtcatgtcagcaccaaaggaaaagagtgacgatggcttaatagaacatttagtttattatagtcaacgcatgtcgaatattttaaatttagatcagcaagcatcgagtgcgcaattagcagcaattgatgattatgaaggtgaaattacgaagtttcaacattttattgatgatatcatgacaaatttaaatgttattaaaatgccagctaatatattatttggtggtaaagatgcgccatcctatgaaacaagtgcacattttatttatgaacatttaggatcagtagacaaagaattaaatggtctgaaggattcgcatcatttaatgacgcatggagaaggcagagatattttagaagaaaatgttattcgctttttcaatgctttaacataattgaagattttaaaaattaacacttgagtgacgatgttattatatttgtcatttgagtgttttttgtggcgtgatagtatagggaacttagctaaagttaatttgtagtgtgatgtcgtggaaatattatggagttataccagaagttgatttgtattgtaatgtcgtggaaattttatgggcattgcacctgaagttgttatgtggcgagatgttggggatatagatggtgttgtatgtggcgagatattggcgcacgtatacagcgttgaaccagaaaatttaatgtagcgtaatgacaacacattacaagagttgattatattatgataaatccaggtgctaccgtattaatgaaacaattttgatgcaggtgtattgcatgttatttacatacatgttagagtgttacttaaacacgtagacgctttaacgctttaaaggagatgtgaatgatgaaaagacaacaatcacaatggaagtcatcaactggatttattttagctagtgcgggttctgcaatcggtcttggtgccatgtggaaattcccatatatggcagggatttatggcggcggtgcctttctagctatgttcttaatattcaccatttttgttgggttgccattactcattatggaattcactgttgggaaaatgggacggacatatacaacacaaatatatagtaaattaactggtaaaaaatggctcaatatcattggctggaacggtaatttggcagtgtttattttatttggcttctatagtgttatcggtggttggattgtcatttacatcggacaagtattatggcaattagttatatttcaacgcatcaatcatctccaagaaatgaattttgaagcggtaatatcaaatccttggttaaccgttctagggcaaggtatattcatattcgctacgatgattattgtcatgttaggtgttgaaaaaggattagaaaaggcatcgaaagttatgatgccattgctgtttgtctttttaatcgtcattgtgattaagtctttaacattagatggcgccttagaaggtgtgaaatttattttacaaccaagagtatcagagattactgctgatggcatcttgtttgcgctaggtcaatcattctttacgttatcattaggaactacaggtatgattacttatgcgagttatgcctctaaagacatgacgattaagtcatcagctatttctatcgttgttatgaatatctttgtatctgtattggcaggtctagctatatttccggctttacatagttttggctatgaaccacaagaagggcctggattattatttaaagtactgccaatggtctttagtcaaatgcatctaggcacattattctatttgggattcttagtgctgttcttatttgcggctttaacgtcatctatttctttattagaattaaatgtttctaacttcacgaagaatgacaatacaaaacgtaaaaaagtcgcagtgatcggtagtattttagtatttatcattagtattccagcaaccttatcttttggtatcttaaaagatgtaagattcggtgcgggaacgatttttgataatatggatttcatcgtttcgaatgtattgatgccattaggcgcattaggtactacgcttgtcgtaggacaattattagataaaaaattattacaacaatattttggtaaagatcgatttagattattcagtggttggtattacttaattaagtatgcgatgcctgtcgttattattttagtctttatcgtgcaattatttagttaatatatagaagcatctgacacacaagtatttgtgttgctcaggtgtttttttgtttggaattgaaaatttagtactggttctgaattaatcgaaacttagataattgcaaaataacaaaatgtcgtttataattcttatctgaaaagtaagaattaaaattgagacatgaagaaaggtttcattcatttgatcggcatgtcagatgagggtgcatctatgattacttatgatttaattggcaatacaccattagtactgttagaacattatagtgatgataaagttaaaatttatgccaagcttgaacaatggaatcctggaggcagtgttaaagacagactcgggaaatatttagtagagaaggcaattcaagaagggcgtgtgcgtgcaggtcaaactattgttgaagcgactgctggtaatacaggcatagggttagctattgcagcgaatagacatcatttgaaatgtaagatctttgcgccgtatggtttttcagaagaaaagattaatattatgatagcgcttggtgcagaagtttcaaggacgagtcagtctgaaggtatgcatggggcacaattagctgcacgttcctatgctgaaaaatatggtgccgtttatatgaatcaatttgaatccgaacataatccggatacatattttcatacattgggacccgaattgacttcagcattacagcaaattgattattttgtggctggtattggctctggcggtacatttacaggtaccgcacgttatttaaagcaacatcacgtgcaatgttatgccgttgagccagaagggtccgtgttaaatggagggccagctcatgcacatgacactgaaggtatcggttctgagaaatggccgatatttttagagagacgtcttgtagatgggatatttacgattaaagatcaagatgcctttcgaaatgtcaaaagtttggctataaatgaagggttgttagtaggcagttcttcaggtgcagcattacaaggtgcattgaatttaaaagcgcaattatctgaaggtacgattgttgtcgtatttccagatggtagtgatcgatatatgtctaagcaaatatttaattatgaggagaataataatgaacaagaaaactaaattaattcatggtgggcacacaacagacgattatacaggtgccgttacaacaccaatttatcaaacaagtacatatttacaagatgatattggtgatttacgtcaaggatatgaatattctcgtactgcgaatccaacaagaagttctgtagaaagcgttattgcgacattagaaaatggcaaacatggctttgcatttagttcaggtgttgcagcaatcagtgcagttgttatgctgttggacaaaggagatcatattattttaaattcagatgtatacggcggtacttatcgcgcattgacaaaagtatttacacgatttggcattgaagtggattttgtagatacaacgcatacagattcaattgtacaagcgatacgcccaacaacaaagatgttgtttattgaaacaccttctaatccattattacgtgttactgacattaaaaagtctgctgaaattgcgaaagaacacggtttgatttcagttgttgataacacatttatgacaccttattatcagaatccattagatttaggtatcgatattgtcttacattctgcaacgaaatatttaggtggacatagtgatgtcgttgctggtttagttgcaacatcggatgacaagcttgcagaacgtttagcatttatttcaaattcaacaggtggcattttaggacctcaagatagctatttacttgtgaggggtattaaaacattaggtttacgtatggaacaaattaatcgcagcgttattgaaattattaaaatgttacaagcacatccagctgtgcaacaagtgttccatccaagtattgaaagtcatttaaatcatgatgtccatatggctcaagcggatggccatacaggtgtgattgcatttgaagtgaaaaatacagaaagtgccaaacaattgattaaagcaacatcgtattacacattagctgaaagtttaggtgcagtggaaagtttaatttcagtacctgcattgatgacacatgcatccattccagcagatattcgagctaaagaaggtattacagacggacttgtaagaatttctgtaggtattgaagatactgaagatttagtcgatgatttaaaacaagcactagatactttataaataatagcagcactggcatatattttgagttcaacgtttgttgttcttgaatatgctagtgcttttttgtgcgatgttaatatttagtaattgcgttgtggaggattggtggacatttttatggatttaatttgataaatgtcatagtagtctcacaattcgtcattgtcacatgaattacttattttttaattttttagaaaattcggcaaattgtattgacgatatatgcaattttacatataatgctcttattcctagtggattaataagaatttgtaggaggggcgatgatgattgagtttcgacaggtaagtaagacctttaataaaaagaagcaaaaaatagatgctttgaaggacgtatcatttacggtcaatcgcaatgatatttttggtgtgattggatatagtggtgcaggaaaaagtacgttggtaagactcgtgaatcatcttgaagctgcctcgaatggacaagtgattgtagatggacatgatattacgaattatagcgataaaatgatgagggatattaagaaagatatcggtatgatatttcagcatttcaatttattaaattcagctaccgtatttaaaaatgtagcaatgccactcattttaagtaagaaaagcaaaacagaaattaagcaacgagtaacggaaatgcttgaatttgtaggattgagtgataaaaaagaccaatttcctgatgaattatctggtgggcagaagcaaagggtggctattgcaagagcgcttgttactaatccgaaaatactcctatgcgatgaagcaacaagcgcattggatccagcaacgactgcttcgatattgacgttattaaagaatgtcaatcaaacctttggcattacaattatgatgattacacatgaaatgcgcgttattaaagacatttgtaatcgtgttgctgtaatggaaaaggggaaagtggttgaaacaggaactgttaaagaggtgtttagtcatcctaaaacgacgattgctcaaaattttgtgtctacagttatacagactgagccaagtacatcattgattcgtcgattgaatgacgaacaagttggcgattttaaagattataaaatcttcgtcgaggaaactcaggtgacacaaccgattataaatgacttgattcaaatttgtggcagagaggttaaaattttattttcatctatgtcagaaatacaaggtaacaccgtatgttatatgtggcttcgatttaatatggatcaacaatttgaagacacggcaataaatcaatatttcaaagagaaaaatattcaatttgaggaggtgcattaacatatgtttggttctgatttagacagtgcacagttattacaagcattgtacgaaacgctatatatggtatctattgctttatttttaggagcagtgattggtattccattaggtgtcttattggtaattactcgaaaacaaggcatatggcccaatatagtgatacatcaagttttaaatcctttaatcaatattttaaggtcactaccatttattattttgttaattgcgattgtgccattcacaaaattagtagtaggtacttcaattggtacgactgctgccatcgtgcctttaacagtatatgtggcaccttacattgcaagacttgttgaaaactcattattggaagtagacgaggggattattgaagcggcgaaagcgatgggcgcttcaccactacaaatcattagatattttttaattcctgaagctttaggttcgttagtattagcaattaccactgcgattattggacttattggaagtacggcgatggcaggagctgttggcggtggtggtataggagacttagctttagtgtatggttatcaaagatttgatacgacggtcattattattaccgttattgtattagtcattattgtccaagtgattcaaacgctagggaatgttctagctagattcatacgtagacattaatgatatatagtgaagattttgaaaggaattgatagaatgaaaagattgattgggttagttatcgtagcacttgtattattagcagcgtgtggtggtaacaatgataaaaaagtaacaattggtgtcgcatcaaatgacactaaggcttgggagaaggttaaagaattagctaaaaaagatgatattgatgtggagattaagcacttctcagattacaatttaccgaataaagcattaaatgatggtgatattgatatgaatgcattccaacattttgcatttttagatcaatataaaaaggcgcataaaggaacaaagatttcagcattaagtacaacagttttagcaccgttgggcatttactcagataaaattaaagatgtcaaaaaggttaaagatggtgctaaagttgtcattccaaatgatgtgtcaaaccaagcacgtgcacttaaactattagaagcagctggtttaataaaactgaaaaaagatttcggattagcaggcacggtgaaagatataacgtcaaatccaaaacatttaaaaattactgcagtagatgcacaacaaactgcacgtgctttatctgatgtcgatattgcagttattaataacggtgtagcaactaaagcgggtaaagatcctaaaaatgatccgatatttttagaaaaatcaaattcagatgcagtaaagccatatattaatattgttgcagttaatgacaaagacttggataacaaaacatatgctaaaatcgtagaattgtatcattcaaaagaagctcaaaaagcgttgcaggaagatgtcaaagatggagagaaacctgttaatttatctaaagatgagattaaggcaatagaaacgtcattagcaaaataaattatattgcgtcctacaagcaaagttcatgcttatgtttgtagggcgttattgttggagaataaaattatttccaatagagaaagggattgtaatcattttatagtgaaatattatgaaattgtaataatttagatattgtaaaatctaataagttgtaataattttaaggggtaattataaaatttgatgatacagtatatgatttttttgtaatcataatgtcatcaaacatcaacctattatacataataaaatcgtataatgatgtagtattcataaattcggataaaagaatgttaggaaagttaagcaagaggaggattttaaagtgcaaaaaaaagtaattgcagctattattgggacaagcgcgattagcgctgttgcggcaactcaagcaaatgcggctacaactcacacagtaaaaccgggtgaatcagtgtgggcaatttcaaataagtatgggatttcgattgctaaattaaagtcattaaacaatttaacatctaatctaattttcccaaaccaagtactaaaagtatctggctcaagtaattctacgagtaatagtagccgtccatcaacgaactcaggtggcggatcatactacacagtacaagcaggcgactcattatcattaatcgcatcaaaatatggtacaacttaccaaaacattatgcgacttaatggtttaaataatttctttatttatccaggtcaaaaattaaaagtatcaggtactgctagctcaagtaacgctgcgagcaatagtagccgtccatcaacgaactcaggtggcggatcatactatacagtacaagcaggtgactcattgtcattaattgcatcaaaatatggtacaacttatcaaaaaattatgagcttaaatggcttaaataatttctttatatatccgggtcaaaaattgaaagtaactggtaatgcatctacgaactcaggatctgcaacaacgacaaatagaggttacaatacaccagtattcagtcaccaaaacttatatacatggggtcaatgtacatatcatgtatttaatcgtcgtgctgaaattggtaaaggtattagtacttattggtggaatgctaataactgggataacgcagcggcagcagatggttacactatcgacaatagacctactgtaggttctatcgctcaaacagatgtaggttactatggtcatgttatgtttgtagaacgtgtaaataacgatggtagtattttagtttcagaaatgaactattcagctgcaccaggtattttaacttacagaacggtaccagcttaccaagtaaataattatagatatattcactaaagtcttacgtatataaatatataatgaattcctattacatttcacaagctgaaaagttggattgaatcctaaattttatggcggggctatcaaagtcgtgattgttgtaataggaatttttgtatatgaaaaaggattggtcgaatgaacttcatgttctatgttcgaccaatccttttctgaattagtattcatgttttactttgcgaatgcttgtaaataatctagcaccgtttgttattaaagtaacaactgccactgcttttttgaacttacgtggtgacttaattgaaatgtaaaagtctaacacggttcctacagtgcttaaacctaatgaaagatatactaattttttatttttagcatgatatttatagccattgtagccgtcgactatgaaacctgcgacatttagtaaacttgataaacgttgtgatttggaacgttttgccataataataattccccctagtatcttctgtttatatgaaaagttgggtgcgctgaattgctaacgttttgcgctataactactcatatatgataacataattgtacagtataatttgaaaaattgatttcacaaagttggggtgtcaaagatgattaaatgtgtctgtttagttgaagaaacagctgataaaatattgcttgttcaagtaaggaatcgcgaaaagtattatttcccgggtggtaaaatagaagaaggggaatcacaagtacacgcgctgttaagagaagtaaaagaagaattaaatttaacattaacaatggatgaaattgaatatgtcgggacaattgtaggtcctgcatatccacaacaggatatgttaactgagttaaatggatttcgcgcattaaccaaaatcgattgggaaaacgtaactatcaataatgaaattacggatatacgctggattgataaagataatgatgcgttgattgcgcctgctgttaaagtttggattgaaacttatggtggtaaacatgacaaataatgacaccatcatgttacgacattatgtcccacaagattattcgatgttagaagcttttcaattaagtgaaagtgatttgaagtttgttaaaacgccagaggaaaatattacagctgcaatgtctgataatgaaaggtatcccatcgttgtaatggatggcaggcaatgtgtggccttttttacattacatcgtggaaaaggggtcgcaccatttagcgataaccaagatgcagtatttttcaggtcatttagtgttgatcaacgttatcgtaatagaggaataggtaaagtggtaatggaaaaattggcgtcatttatcacttcaacatttcaggatattaatgagattgtgttaacggttaatactgacaatccacatgccatggcactttatcgccaacaaggatatcaatatatgggagatagtatgttcgtcggaagacctgttcatattatggcgttaactataaaataaattaaatttaaaagcatctttactcatcgtcgaccacaacaattaatgatgaataaaggtgctttttgttatagatcatcggacaatttactatagtaaaaagcgacctagtgaacaattgacatatatccacaggtcgcttaacttaagttatattgctagttgcgattaattgatagactcatcatttttgcgctgtcgagatggtctttttattaaaaatgccgtaatccaagccgtaatcggaatactgattgcaacggcaataccgcctaaaataatagaaataaattcttgggcaaatattttcgagtttataatatgaccaaatgaatatttaagtttgaaaaaccaaataaataaagcaagttggccaccaaaaaaggcaaggtaaatcgtgttcgcagatgtcgctaaaatttctctaccaacacgcatgccagattggaataattcgtattgcgtaagcgttggattcacttgatgcaattcataaatgggtgaactaatggtaattgttaaatctatcacagctgcaataacagcaagaataatagtgaacaccataaattgaaccatatcaatgccaatattcattgaatacacatatgtttcatcttgttgttcggttgaaaagccttgtagatgaccgaagtagaccgataaataaatgagtgtaatcaacaatattgttgtaacgatagtgctgataaatgcagcttgtgttttaacattgtaactattgagtacgaataaattacaagcgccaataataatgcagaaaaagaatgtgacgacataaatcggtacgccaaaaataatcaatacaatactaataattaaaatagcgaaatttaaaaatagagttaaataagagatgaatccctttttacctccgaaaattatcatcagaaagaggagcaataacgccaatataaatacagcattcattgtttcgccctccttaatgtttcaaatatttccataaacaatattgtgataggaattgtaagtacgatacctataccacctgttagtgcgcgcgcaatttctaacgaccaattcatcgaaatagtataagtcactgtattggcattttttaaaaagattaaaaacataggtagtgcaccggataaatatgagaataataagatgttagtcattgttcccataatatcttggccgatgtttcgcccagcaagcgcccatctcctcattgaaatgtgtggcgtacgctgtaaaatttcatgcataccactagcaattgtaattgcaacatccataatagcgccaagtgaacctattaacactgaggctaggaagatatctttcggtggtaatgataaaaagttcatcgtttcatatttaatgcctttaccatctgtcatatatatgattaattctgttaaacctatactcaaaaaagttccgataattgtactggctatggtaatgagtgtacgcatatgccagcctgtaacgagcaataaagtgagtattgttgaacagatcatggcaatggtcatgagtaagaataaattaatattgctatgttgaatatgaatgtaaattgcgattaatatggcaatagaattcaagattaacgataaaatcgattgcagtccgactttgcgaccaaccaataatacagttaataagaacaaaccagtgatgataaccgttaaggtatcacgcttcttttctataatataagcatcactcggcttgttagaaatatgtaataatactttttcgtgtgtgcgaaatgcctcagaatctgcttgcgatttgacgtactgatgattaatcgtcgtcgtttctccagcaaattgaccatttaatattttgacttttaattgatttttatatttaatatcacgattattttgtgcatcttttgtaggtgtcgaagaaacatgtttgacatctataatttgaccaattggtttgttgtaaaagttctcattattgaatgtaaataaaatagcaccaatgaatgcgatgcagaacaaacctaaaattatattaaatggctttgtaaataaatttctatatttcaaaaacaaaaccccaattctatgaatgaattaatatggtgattatacgcccttaattttttattttcaaagatattactgctaagtgtaaaacgaaaatcatcattgatagcatcgaattacttaatggaatgtagacgttttagtcattaattgctgaataagtgttaataatatgccaatatcactctttgtataaggctcctttgtaatagcacatatcgttctttttaattcagtatgatctaattttatatctatccatgatttagattctggtaaatgtatattttgtgatgaaatgatgtaaccttctttttgacgaaggagatactgcgcaagtggttggctactgattgtgtatacatctgatttagtaatcttgcgcaattgtttttttacagtttcggcaaatggtgccaagcaataaatatgactatgctcaaactgaattaatggtgggtgtgtcgccatcgtaattggatcgtctgaaggcgcatataaatgatagtgctcttcgaataaaggtagcatatgtaattgtttgtgtttacgtatttctggtgtaagttccgtgaaaccaatgtctatattcccatttaatacgctatttataattgtgtcatgttctaataagctcggtatgacatgtgtatcattttgtaaatgaaacgtttggataagtggtagtaacatgtgggatacgtcactctcatcatagccaatgtagatacttttatttttagttaatccatggctttgaaattgttcaatcgtgctatctaaatgttcaataatacgcagagcttcattaaataataatttcccttcagatgtgagcgtaatattgcgtccttgctttttaaataaagacacattaagttcttgttctaataatgtaatttgacggcttatcgctgattgagcaatgtttagttcaagtgctgtttcggagatatgttctcttttagcgacctcgataaaatatcttaattgtttaatttccatagcgatataggcacctccaaaaatgagtgttttgtaactattatagcaatattattgataaatgttctattttttagatgaatatcttctattttatatattgaacagataaattttttagattatagtaattatcattaataactaatatcagaatattctaaaaaaggggtgtgcatcatgcacaatgagaaattaattaaaggcttatatgactatcgtgaggaacatgatgcgtgtggtattggtttttatgcgaatatggataataaaaggtctcacgacatcattgataaatcgcttgaaatgttgcgacgcttagatcacaggggcggggtcggcgcagatggcatcactggtgatggcgcaggtattatgactgaaataccttttgcatttttcaaacaacatgtaacggactttgatatcccaggtgaaggtgaatatgccgtggggttatttttttccaaagaacgcattttaggttctgaacatgaagtagtttttaaaaaatattttgaaggcgaagggttatcaattcttggttatcgtaatgtaccagttaataaagatgccattgctaaacatgtagcagatacgatgccagtcattcaacaagtgtttattgatattagggacattgaagatgttgaaaagcgtttgtttttagcgagaaaacaattagagttctattcgactcagtgcgatttagaattgtattttacgagcttatcacgcaaaacaattgtatataaaggttggttacgatcagaccaaattaaaaaactatatacagatttatcggatgatttatatcaatcaaagctagggttagtgcattcgagatttagtacgaatacattcccgagttggaaaagggcacatcctaaccgtatgttaatgcataatggtgagattaacacgattaaaggtaatgtaaactggatgcgagcacgccaacataaattaatcgaaacattatttggcgaggatcaacataaagtgtttcaaattgtcgatgaggatggtagtgactctgccattgtagataatgcgctagagttcttatcgttagccatggagccagaaaaggcagcgatgttactcatacctgaaccttggttatataatgaagcgaatgatgcaaatgtacgtgcgttttatgaattttatagttatttaatggaaccgtgggatggtcctacaatgatttcgttctgtaacggtgacaaacttggcgcgcttacagatagaaatggattacgtccaggtcgttatacgattactaaagataactttattgtcttttcatctgaagtgggtgttgtggacgtacctgaaagtaatgttgcttttaaaggtcaattgaatcctggaaagttattgcttgttgattttaaacagaataaagtcattgaaaataatgatttaaaaggtgcgattgctggagaattaccatataaagcgtggattgataaccataaagttgactttgattttgaaaatatacaatatcaagattcgcaatggaaagatgagacgttatttaaattacaacgtcagtttgcatacacgaaagaagagattcataagtatattcaggaacttgtagaaggtaagaaggatcctatcggtgcaatgggatatgatgcgccaattgcagtgttgaacgagcgaccagaatcactatttaattactttaaacagctgtttgcacaagttacgaatccaccaattgatgcgtatcgtgaaaaaatcgtaacgagtgaactttcttatttaggtggcgaaggtaacttactagcacctgacgaaacggttttagatcgtattcaattgaaaaggccggtattgaatgaatcacacttagcagcgattgatcaggaacattttaaattaacttatttatcaacggtatatgaaggggatttggaagatgcgttagaagcattaggccgagaagcagtgaatgctgtaaagcaaggcgctcaaattctagtgttagatgatagtggattagttgatagcaatggctttgcaatgccgatgttactcgcaataagtcatgtgcatcaattacttattaaagcagatttacgtatgtctacaagtttagtcgctaaatctggtgagacacgagaagtgcatcatgttgcttgtttactcgcatatggcgcgaatgcaattgtgccatacctagcgcaacgtacagttgaacaactgacattgacagaagggttacaaggcaccgttgtcgataatgttaagacatatacggatgtattgtcagaaggtgtcattaaagtaatggctaagatgggaatttcgacagtgcaaagttatcaaggggcacaaatatttgaagcgattggcttgtctcatgatgtgattgatcgttattttactgggacacagtctaagttatctggtatttcgattgatcaaattgatgctgaaaataaagcacgtcaacaaagtgatgataattatcttgcatcaggtagtacattccaatggagacaacaaggtcaacatcatgcttttaatccggaatctattttcttattgcagcacgcatgtaaagaaaatgactatgcgcaatttaaagcatactctgaagcggtgaacaaaaatagaacagatcacattagacatttacttgaatttaaagcatgtacaccgattgacatcgaccaagttgaaccggtaagtgacattgtcaaacgctttaatacaggggcgatgagttatggatcgatttcagcggaagcacatgaaacgttagcacaagccatgaaccaattaggtggaaagagtaatagtggtgaaggtggcgaagatgcaaaacgttatgaagtacaagttgatggaagcaacaaagtaagtgcgattaaacaagttgcttctgggcgttttggtgtaactagtgattatttacaacatgccaaagaaattcaaattaaagttgcgcaaggtgcaaagcctggtgaaggtggtcaattacctggtactaaggtatatccgtggattgcgaagacaagagggtcaacgccaggtatcggtctgatttcaccaccgccacatcatgatatttattcaatagaagatttagcgcaactgatacatgatttgaaaaatgcgaataaagatgcagatatcgcggtaaaattagtttcgaaaacaggtgttggtaccattgcatctggggtggcaaaagcatttgcagataaaattgtcatcagtggttacgatggtggtacaggggcttcacccaaaacgagtattcagcatgccggtgttccttgggagattggtttagcagaaacacatcaaacattaaaactaaatgacttaagaagtcgtgttaagttagaaacagacggtaagttattaactggtaaagatgtagcgtacgcatgtgcgcttggagcggaagaatttggatttgcaactgcaccattagtggtgttgggctgtattatgatgcgtgtatgccataaagatacatgtccagtaggagttgcaactcaaaacaaagatttacgtgctttatatagaggtaaagcacatcatgttgttaattttatgcattttattgcacaagaattaagagaaattttagcatctttaggtttgaaacgtgtagaagacttagttggaagaactgatttattacaacgatcatcaacattaaaagcgaatagcaaagcggctagtattgatgttgaaaaactgttatgtcctttcgatgggccaaacacaaaagaaattcaacaaaatcataatcttgagcatggatttgatttaacaaatttatatgaagtaacgaagccatatattgctgaagggcgtcgctatacaggtagctttacagtaaataatgaacaacgtgatgtaggggttattacaggtagtgagatttcgaaacaatatggagaagcaggacttcctgaaaatacaattaatgtttatacgaatggtcatgctggtcaaagtcttgcagcatatgcaccgaaaggcttaatgattcatcatactggagatgcgaatgactatgttggtaaaggattatctggtggtacggtcattgtcaaagcaccttttgaagaacgacaaaatgaaattattgctggtaacgtctcattctatggtgcgacaagtggtaaggcatttattaacggtagtgcaggagaaagattctgtattagaaatagtggtgtagatgttgtcgttgaaggtatcggcgaccatggattagagtatatgactggtggacatgtcattaatttaggtgatgtaggtaagaacttcggtcaaggtatgagtggtggtattgcttacgttatcccgtctgatgtagaagcttttgttgaaaataatcaactagatacgctttcgtttacaaagattaaacaccaagaagaaaaagcattcattaagcaaatgctggaagaacatgtgtcacacacgaatagtacgagagcgattcatgtgttaaaacattttgatcgcattgaagatgtcgtcgttaaagttattcctaaagattatcaattaatgatgcaaaaaattcatttgcacaaatcattacatgacaatgaagatgaagcgatgttagctgcattttacgatgacagtaaaacaatcgatgctaaacataaaccagccgttgtgtattaaggaaagggggagatacgatgggtgaatttaaaggatttatgaagtatgacaaacagtacttaggtgaattatcactggtagaccgtttgaagcatcataaagcatatcaacaacgatttactaaagaagatgcctctatccaaggtgcacgatgtatggattgtggaacgccgttttgtcaaaccggacaacagtatggtagggaaacaataggttgtccaattggaaactacattcctgaatggaacgacttagtgtatcatcaagattttaaaactgcttatgaacgcttaagcgaaacaaataactttcctgactttacagggcgtgtatgtcctgcaccatgcgaaagtgcttgtgtgatgaagattaatagagaatcgattgcgattaaaggtattgaacgcacaattattgatgaagcttttgaaaatggttgggtagcgccgaaagttccgagtcgccgtagagatgaaaaagtggcaatcgttggaagcggtccagcaggattagctgctgctgaagaacttaatctactaggatatcaagtaactatttatgaacgtgctagagaatcaggcggtttattaatgtatggtattccgaatatgaaacttgataaagatgtggttcgacgtcgtattaagttaatggaagaagcgggcattactttcattaatggtgttgaagtcggcgttgatattgataaagcaacgttagaatctgagtatgatgccattatattatgtactggtgcacaaaaaggtagagatttacctttagaaggacgcatgggtgatggtatacatttcgctatggattatttaactgaacaaacgcagttgttaaatggagaaattgatgatataacaataactgcaaaagataagaatgtcattatcattggtgctggtgatacaggggcagactgtgtagcgacagcattaagagaaaattgtaaatcgattgttcaatttaataaatatacgaaattgccagaagcaattacatttacagaaaatgcatcatggcctttagcaatgccggtgtttaaaatggactatgcgcaccaagagtacgaagctaagtttggtaaggaaccacgtgcatatggtgttcaaacaatgcgttacgatgttgacgataaaggacacatacgtggtttgtatactcaaattttagagcaaggcgaaaatggtatggtcatgaaagaaggacctgaaagattttggcctgctgaccttgtattattatcaatcggcttcgaaggtacagaaccaacagtaccgaatgcttttaacattaaaacggatagaaatcgaatcgtggcggatgatacaaactatcaaactaataatgaaaaggtatttgctgctggagatgctagacgtggtcaaagtttagttgtatgggcaattaaagaaggtagaggcgtagcgaaagcagtagatcagtatttagctagtaaagtttgtgtataatctttgtatggaaatggtggttacgttgacgttgtgacatgctgaatcgagtttgaaaaaatctagtatctatcaacgtcacatgccatctttgtaacctaaaaacaaaggtttgtaagacaacaaatagattaattataagtagtgattttttacattcgtttataggtcaactgtagtggaagacaatgatttgtggtaatcatgtaatgcttaaaaacaatattgacttttacagaacgttcatatatgataaatattgtgtttaggaggaatacccaagtccggctgaagggatcggtcttgaaaaccgacaggggcttaacggctcgcgggggttcgaatccctcttcctccgccatcaatatttatattaaattctatatataatgaaggtaagtgctcaaattttgagtatttaccttttttatttgtctttgaatggctcgtaatttttgataatagaaatgataaggcattgagattggaagggcatttggcttgtgcaatatacatagctaaatgtcttttttgttttgtgaaatatgatggatggcttgtgtggacaagtttgctatttatagatatgcatttttcaatttaggagttggccatgcatctacactttataatggtgagagcgtggtgaggtattgttaataacgcaattgtagcgaggagttattgctacatatgtcgttatggctcattgattttctgaaatggctaccccagataattgtgacaaaataaaaatattttgttgaaagcctttacataacttgtctagacaagttatactcgttttaagacattaagggagtgaaatatatggctgtaaaaagagaagatgtaaaagccatcgtaaccgctattgggggaaaagaaaatcttgaagctgcaacgcattgtgtaacacgattacgtttagtgctgaaggatgaaagtaaagttgataaagacgcattaagtaataacgcgttggtcaaggggcagtttaaagcagaccatcaatatcaaattgtcattggtccaggaacagtcgatgaagtgtataagcagtttattgatgaaacaggtgctcaagaagcttcgaaagatgaagcgaaacaagcagctgcacaaaaagggaatccagtacaacgtttgatcaaattgttgggggatatttttataccaatattacctgcgattgtgacagctggtttgttaatgggaatcaataatttacttacaatgaaaggtttatttggtccaaaagcacttattgagatgtatccacaaattgctgatatttcaaacatcattaatgtgattgcgagtacggcatttattttcttaccagcattaattggttggagtagtatgcgtgtatttggtggtagtccgattctaggcatagtcttaggtttgattttaatgcatccgcaattagtatctcagtatgatttggcaaaagggaatattccgacgtggaacttatttggcttagagattaagcagttgaattaccaaggtcaagtgttgccagttttaattgcagcttacgttctagctaaaattgaaaaaggattaaataaagtcgttcacgattcgataaaaatgttggtcgttggacccgtagcgcttttagttactggatttttagcatttattatcattggaccagttgcgttattgattggtacaggtattacatctggtgttacatttatattccaacatgcaggatggcttggcggagcaatatatggattgttatatgcaccacttgtaattacaggactacaccatatgtttttagcagtagatttccaattgatgggtagcagcttaggcggtacgtatttatggccaattgttgcgatttccaatatttgtcagggctctgcagcatttggagcatggtttgtctataaacgtcgtaaaatggttaaagaagaaggcttggcattaacatcttgtatttctggtatgttaggtgttactgaaccagccatgttcggtgtgaacttacctctgaaatatccatttatcgctgcgatatcaacgtcttgtgtattgggggcaatcgttggtatgaataacgtacttggaaaagttggtgttggtggcgtgccagcattcatttcaattcaaaaagaattttggccagtatatcttattgtgacagctattgctattgttgtaccatgtatactaacaattgtgatgtctcattttagtaaacaaaaagcgaaagaaattgttgaagattaataaaataaaaaaggggcgttcgttatttggacgtcctttattacgttataaggtggtaattgtgtgtcgaaagaaatagattggagaaaatccgttgtatatcaaatttatcctaagtcgtttaatgatacgacggggaatggtataggagatatcaatggaattatagaaaaattggattatatcaagttattgggtgttgattatatttggttaacaccagtgtatgaatcaccgatgaatgataatggctatgatatcagcaattatttagaaatcaatgaagactttggaacgatggatgattttgaaaagttaatcaaagttgcgcatcaaaaagacttgaaagtgatgttagatattgtcattaatcatacgtcgacggagcatgaatggtttaaagaagcccgtaaatctaaagataacccttatagagattattactttttcagatcatctgaagacgggccgccaacaaattggtattctaaattcggtggtaatgcatggaagtatgattctgagacagatgaatattatttacatttatttgatgtcagtcaagctgatttaaattgggataatccggaagtacgtcaatcgttatatcgcatagtcaatcattggatagacttcggcgttgatggttttcgatttgatgtcattaacttaatttctaaaggtgaatttaaggactctgacaaaataggtaaagaattttatacggatggtcctagagtgcatgagtttctgcatgaattaaatcgtcaaacgtttggtaacactgacatgatgactataggagaaatgtcttcgacgacgattgaaaattgtattaagtatacacaaccagaacgccaagaattgaatagtgtttttaattttcatcatctaaaggttgattatgttgatggtgaaaagtggacaaatgcgaagcttgattttcataagttaaaggaaattctgatgcaatggcaacgaggtatttatgacggtggcggatggaacgcgattttctggtgtaatcatgatcagccacgggtagtgtctagatttggtgatgatacgtcggaagagatgaggatacaaagtgctaaaatgttagctatcgcactgcatatgttgcaagggacgccatatatttaccaaggtgaagaaattggtatgacggacccacattttacatcaatagcacaatatcgtgatgttgaatcgattaatgcctaccatcagttgttaagtgaagggcatgctgaagcggatgtgttagcgattttaggacagaagtcacgagacaattcgagaacgcctatgcaatggagtgatgatgttaatgctggatttacagctggtaagccttggattgatatttcggaaaattatcatcaggtcaacgttagacaagcacttcagaataaagagtctattttctatacgtatcaaaaattaatacaattaagacatacgcatgatattattacgtatggagacattgtgccacgttttatggatcatgatcatttatttgtttatgaacgtcattataagaatcaacaatggctagtaattgcgaatttctcagcatcggctgttgatttgccagaaggattggctagagaaggttgtgttgtgattcaaacaggcacagtggaaaataatacgataagcgggtttggtgcaattgtaatcgaaacaaacgcgtaaaataaattgagtggatgcgtttatatggcgaaacaaaaaaagtttatgaagatttatgaggcgttgaaagaagatatattaaacgggcagattcaatatggtgaacaaattccgtctgaacatgatttggtgcaattgtaccagtcatctcgagagaccgtgcgtaaggcattagatttgttggcattagacggcatgattcaaaagattcatggtaaagggtcacttgtcatttatcaggaggttacagagtttccattttctgaacttgttagttttaaagaaatgcaagaagaaatgggcgtcgcatatttaactgaagttgttgtgaatgaggttgttgaagcgcatgaagttccagaagttcaacatgctttaaacatcaattctagtgaatcactcattcatattgttagaactcgtcggcttaaccaacatgtgaagattgttgatgaagattattttctaaagtcgattgtttcagatataggtaatgatgttgcgagtgattctatttatgattatttggaaaaggtattaaatcttaatattagttattcaagtaagtctattacttttgaaccgtttgatgaacaagcatatcaattgtttggtgatgtatcggtggcttattcagcaacagttcgaagtattgtgtatttagaaaatacaatgccgtttcaatataatatttcaaaacatcttgcaaatgaatttaaatttaatgacttctcaagacgtcgtataaagtaaacaatgatataaatgatttatacttgcaattaactattaaaatatagtaatatatatcttgccgtgctaggtggggaggtagcggttccctgtactcgaaatccgctttatgcgaggcttaattcctttgttgaggccgtatttttgcgaagtctgcccaaagcacgtagtgtttgaagatttcggtcctatgcaatatgaacccatgaaccatgtcaggtcctgacggaagcagcattaagtggatcatcatatgtgccgtagggtagccgagatttagctaacgactttggttacgttcgtgaattacgttcgatgcttaggtgcacggttttttattttttaaatattaaaccgattattaagagttgaaaatatataattatagaagctactttcttgaagacaattcagcgtattatacgtggaacatgtttgtgggaagtagcttttttatatgtgaagtttgattcaagtgaactcgatgtgcagtttgaatgatttttgtgtcaatgaaaagtaagaagttataatttgatgataaagaaatgatggtgaaatgagggggagtatcttacaatagaattattaatgagatacgttatgattattgacaatcaaatgcctacggaggacatatgcaaatatatttaagtactttaacagagttagattatgataaatctttaaatagtattgaagaaagttttgatgataatcctgaaacgagttggcaagcacgtgcgaaagtaaaacatttaagaaaatctccttgctataattttgaattagaagtaatagcgaaaaatgaaaataacgatgtcgttggacacgttttattaattgaagtagaaattaatagtgatgataagacgtattatggtttggcgattgcctctttatcagttcatcctgaattacgtggacaaaaattaggtcgtggcttggttcaagcagtagaagagcgtgccaaagcacaagagtatagtacggttgttgtagaccattgttttgactactttgaaaagttgggttatcaaaatgctgctgagcatgacattaaattagaatctggtgatgcaccgttacttgtaaaatatttatgggataatttgacggatgcaccacacggaatcgtaaaatttccagaacatttttattaattgttcaattaagaagtaaaggtattatcatgctataatgagaggtaattgtttatggaggtgctaacttgaattatcaagccttatatcgtatgtacagaccccaaagtttcgaggatgtcgtcggacaagaacatgtcacgaagacattgcgcaatgcgatttcgaaagaaaaacagtcgcatgcttatatttttagtggtccgagaggtacggggaaaacgagtattgccaaagtgtttgctaaagcaatcaactgtctaaatagcactgatggagaaccttgtaatgaatgtcatatttgtaaaggcattacgcaggggactaattcagatgtgatagaaattgatgctgctagtaataatggcgttgatgaaataagaaatattagagacaaagttaaatatgcaccaagtgaatcgaaatataaagtttatattatagatgaggtgcacatgctaacaacaggtgcttttaatgcccttttaaagacgttagaagaacctccagcacacgctatttttatattggcaacgacagaaccacataaaatccctccaacaatcatttctagggcacaacgttttgattttaaagcaattagcctagatcaaattgttgaacgtttaaaatttgtagcagatgcacaacaaattgaatgtgaagatgaagccttggcatttatcgctaaagcgtctgaagggggtatgcgtgatgcattaagtattatggatcaggctattgcatttggtgatggtacgttaacattgcaagatgcgttgaatgtcacaggtagcgtacatgatgaagcgttggatcacttgtttgatgatattgtacaaggtgacgtacaagcatcttttaaaaaataccatcagtttataacagaaggtaaagaagtgaatcgcctaataaatgatatgatttattttgtcagagatacgattatgaataaaacatctgagaaagatactgagtatcgagcactgatgaacttagaattagatatgttatatcaaatgattgatcttattaatgatacattagtgtcgattcgttttagtgtgaatcaaaacgttcattttgaagtgttgttagtaaaattagctgagcagattaagggtcaaccacaagtgattgcgaatgtagctgaaccagcacaaattgcttcatcgccaaacacagatgtattgttgcaacgtatggaacagttagagcaagaactaaaaacactaaaagcacaaggagtgagtgtcgctcctgttcaaaaatcttcgaaaaagcctgcgagaggcatacaaaaatctaaaaatgcattttcaatgcaacaaattgcaaaagtgctagataaagcgaataaggcagatatcaaattgttgaaagatcattggcaagaagtgattgatcatgccaaaaataatgataaaaaatcactcgttagtttattgcaaaattcggaacctgtggcggcaagtgaagatcacgtacttgtgaaatttgaggaagagatccattgtgaaatcgtcaataaagacgacgagaaacgtagtagtatagaaagtgttgtatgtaatatcgttaataaaaacgttaaagttgttggtgtaccatcagatcaatggcaaagagttcgaacggaatatttacaaaatcgtaaaaacgaaggcgatgatatgccaaagcaacaagcacaacaaacagatattgctcaaaaagcaaaagatcttttcggtgaagaaactgtacatgtgatagatgaagagtgatacatgacaagcgatataatcgtatgtataatgaaagaaacatcattttattgataaatatttattgattttcaaggaggaaatggaatatgcgcggtggcggaaacatgcaacaaatgatgaaacaaatgcaaaaaatgcaaaagaaaatggctcaagaacaagaaaaacttaaagaagagcgtattgtaggaacagctggcggtggcatggttgcagttactgtaactggtcataaagaagttgtcgacgttgaaatcaaagaagaagctgtagacccagacgatattgaaatgctacaagacttagtgttagcagctactaatgaagcgatgaataaagctgatgagcttactcaagaacgtttaggtaaacatactcaaggcttaaacatccctggaatgtgatcatagatgcattatccagaacctatatcaaaacttattgatagctttatgaaattgccaggcattggtccaaagacagcccaacgtctggcttttcataccttagatatgaaagaagacgatgttgttcagtttgccaaagcattagtagatgttaagagagaattaacatattgtagcgtatgtggtcacattactgaaaatgatccatgttatatttgtgaagataagcaaagagatcgttcagttatttgtgttgtggaagatgacaaagatgtcatagctatggaaaaaatgagagaatacaaaggtttatatcacgttttacatgggtctatttcgcctatggatggcattggaccagaagatattaatattccttcattgattgaacgcttgaaaaacgatgaagttagcgaattaatcttagctatgaacccgaacttagagggggaatctacagccatgtatatttctagattagttaagcctataggtatcaaagtgacgagattagcacaagggttatcggtaggtggcgatttagagtatgctgacgaagtaacattatctaaagcaatcgcaggtagaacagaaatgtaatgtcttctattaaacatttttgattttaatactatagtaagaaaagtcacagtgtaatcattgtggctttttttatggtgtggtgtgatgtactactttatttgcggtgtggcggtggtatggtttacctagttttactgagggatgggtaatctttaggaagcaagccgttggttgtgatttgttacttctaatagtaatgatgtgaattggattatcgaattagatctatggttatggtgtgttggtgctattaatttgataaatgcggttaatgactatgcaaatgaaattcttttgtaattgaaatgatagatgctggcttagtaagttgtacttctttggtctaaagcttattaaatcagcctgtatagcggtgttttgagagattatttaaaacttgtaaatttatttttaatttctggtaaaaaaataacgttctgttttgcgttttttttgattgatatggttagagaaaaatctgtttcttgttctaaaaaacgtactatttataagtggggattttttaagttcgatttttaggataagggcgttcagtacagatgacaaaggtgtaatttttactgttgttaagcagtttgaaagcctgtatagtatttatttgttgaggcaaacaaaacaactcaacttaagaaataacttgaattactaacgaaaattaattttaaaaagttattgacttaaatgttaataaaatgtataattaattcttgtcggtaagaaaaatgaacattgaaaactgaatgacaatatgtcaacgttaattccaaaaaacgtaactataagttacaaacattatttagtatttatgagctaatcaaacatcataatttttatggagagtttgatcctggctcaggatgaacgctggcggcgtgcctaatacatgcaagtcgagcgaacggacgagaagcttgcttctctgatgttagcggcggacgggtgagtaacacgtggataacctacctataagactgggataacttcgggaaaccggagctaataccggataatattttgaaccgcatggttcaaaagtgaaagacggtcttgctgtcacttatagatggatccgcgctgcattagctagttggtaaggtaacggcttaccaaggcaacgatgcatagccgacctgagagggtgatcggccacactggaactgagacacggtccagactcctacgggaggcagcagtagggaatcttccgcaatgggcgaaagcctgacggagcaacgccgcgtgagtgatgaaggtcttcggatcgtaaaactctgttattagggaagaacatatgtgtaagtaactgtgcacatcttgacggtacctaatcagaaagccacggctaactacgtgccagcagccgcggtaatacgtaggtggcaagcgttatccggaattattgggcgtaaagcgcgcgtaggcggttttttaagtctgatgtgaaagcccacggctcaaccgtggagggtcattggaaactggaaaacttgagtgcagaagaggaaagtggaattccatgtgtagcggtgaaatgcgcagagatatggaggaacaccagtggcgaaggcgactttctggtctgtaactgacgctgatgtgcgaaagcgtggggatcaaacaggattagataccctggtagtccacgccgtaaacgatgagtgctaagtgttagggggtttccgccccttagtgctgcagctaacgcattaagcactccgcctggggagtacgaccgcaaggttgaaactcaaaggaattgacggggacccgcacaagcggtggagcatgtggtttaattcgaagcaacgcgaagaaccttaccaaatcttgacatcctttgacaactctagagatagagccttccccttcgggggacaaagtgacaggtggtgcatggttgtcgtcagctcgtgtcgtgagatgttgggttaaagtcccgcaacgagcgcaacccttaagcttagttgccatcattaagttgggcactctaagttgactgccggtgacaaaccggaggaaggtggggatgacgtcaaatcatcatgccccttatgatttgggctacacacgtgctacaatggacaatacaaagggcagcgaaaccgcgaggtcaagcaaatcccataaagttgttctcagttcggattgtagtctgcaactcgactacatgaagctggaatcgctagtaatcgtagatcagcatgctacggtgaatacgttcccgggtcttgtacacaccgcccgtcacaccacgagagtttgtaacacccgaagccggtggagtaaccttttaggagctagccgtcgaaggtgggacaaatgattggggtgaagtcgtaacaaggtagccgtatcggaaggtgcggctggatcacctcctttctaaggatatattcggaacatcttcttcagaagatgcggaataacgtgacatattgtattcagttttgaatgtttatttaacattcaaatattttttggttaaagtgatattgcttatgaaaataaagcagtatgcgagcgcttgactaaaaagaaattgtacattgaaaactagataagtaagtaaaatatagattttaccaagcaaaaccgagtgaataaagagttttaaataagcttgaattcataagaaataatcgctagtgttcgaaagaacactcacaagattaataacgcgtttaaatctttttataaaagaacgtaacttcatgttaacgtttgacttataaaaatggtggaaacatagattaagttattaagggcgcacggtggatgccttggcactagaagccgatgaaggacgttactaacgacgatatgctttggggagctgtaagtaagctttgatccagagatttccgaatggggaaacccagcatgagttatgtcatgttatcgatatgtgaatacatagcatatcagaaggcacacccggagaactgaaacatcttagtacccggaggaagagaaagaaaattcgattcccttagtagcggcgagcgaaacgggaagagcccaaaccaacaagcttgcttgttggggttgtaggacactctatacggagttacaaaggacgacattagacgaatcatctggaaagatgaatcaaagaaggtaataatcctgtagtcgaaaatgttgtctctcttgagtggatcctgagtacgacggagcacgtgaaattccgtcggaatctgggaggaccatctcctaaggctaaatactctctagtgaccgatagtgaaccagtaccgtgagggaaaggtgagaagcaccccggaaggggagtgaaatagaacctgaaaccgtgtgcttacaagtagtcagagcccgttaatgggtgatggcgtgccttttgtagaatgaaccggcgagttacgatttgatgcaaggttaagcagtaaatgtggagccgtagcgaaagcgagtctgaatagggcgtttagtatttggtcgtagacccgaaaccaggtgatctacccttggtcaggttgaagttcaggtaacactgaatggaggaccgaaccgacttacgttgaaaagtgagcggatgaactgagggtagcggagaaattccaatcgaacctggagatagctggttctctccgaaatagctttagggctagcctcaagtgatgattattggaggtagagcactgtttggacgaggggcccctctcgggttaccgaattcagacaaactccgaatgccaattaatttaacttgggagtcagaacatgggtgataaggtccgtgttcgaaagggaaacagcccagaccaccagctaaggtcccaaaatatatgttaagtggaaaaggatgtggcgttgcccagacaactaggatgttggcttagaagcagccatcatttaaagagtgcgtaatagctcactagtcgagtgacactgcgccgaaaatgtaccggggctaaacatattaccggagctgtggattgtcctttggacaatggtaggagagcgttctaagggcgttgaagcatgatcgtaaggacatgtggagcgcttagaagtgagaatgccggtgtgagtagcgaaagacgggtgagaatcccgtccaccgattgactaaggtttccagaggaaggctcgtccgctctgggttagtcgggtcctaagctgaggccgacaggcgtaggcgatggataacaggttgatattcctgtaccacctataatcgttttaatcgatggggggacgcagtaggataggcgaagcgtgcgattggattgcacgtctaagcagtaaggctgagtattaggcaaatccggtactcgttaaggctgagctgtgatggggagaagacattgtgtcttcgagtcgttgatttcacactgccgagaaaagcctctagatagaaaataggtgcccgtaccgcaaaccgacacaggtagtcaagatgagaattctaaggtgagcgagcgaactctcgttaaggaactcggcaaaatgaccccgtaacttcgggagaaggggtgctctttagggttaacgcccagaagagccgcagtgaataggcccaagcgactgtttatcaaaaacacaggtctctgctaaaccgtaaggtgatgtataggggctgacgcctgcccggtgctggaaggttaagaggagtggttagcttctgcgaagctacgaatcgaagccccagtaaacggcggccgtaactataacggtcctaaggtagcgaaattccttgtcgggtaagttccgacccgcacgaaaggcgtaacgatttgggcactgtctcaacgagagactcggtgaaatcatagtacctgtgaagatgcaggttacccgcgacaggacggaaagaccccgtggagctttactgtagcctgatattgaaattcggcacagcttgtacaggataggtaggagcctttgaaacgtgagcgctagcttacgtggaggcgctggtgggatactaccctagctgtgttggctttctaacccgcaccacttatcgtggtgggagacagtgtcaggcgggcagtttgactggggcggtcgcctcctaaaaggtaacggaggcgctcaaaggttccctcagaatggttggaaatcattcatagagtgtaaaggcataagggagcttgactgcgagacctacaagtcgagcagggtcgaaagacggacttagtgatccggtggttccgcatggaagggccatcgctcaacggataaaagctaccccggggataacaggcttatctcccccaagagttcacatcgacggggaggtttggcacctcgatgtcggctcatcgcatcctggggctgtagtcggtcccaagggttgggctgttcgcccattaaagcggtacgcgagctgggttcagaacgtcgtgagacagttcggtccctatccgtcgtgggcgtaggaaatttgagaggagctgtccttagtacgagaggaccgggatggacatacctctggtgtaccagttgtcgtgccaacggcatagctgggtagctatgtgtggacgggataagtgctgaaagcatctaagcatgaagcccccctcaagatgagatttcccaacttcggttataagatccctcaaagatgatgaggttaataggttcgaggtggaagcatggtgacatgtggagctgacgaatactaatcgatcgaagacttaatcaaaataaatgttttgcgaagcaaaatcacttttacttactatctagttttgaatgtataaattacattcatatgtctggtgactatagcaaggaggtcacacctgttcccatgccgaacacagaagttaagctccttagcgtcgatggtagtcgaacttacgttccgctagagtagaacgttgccaggcaaaaaatggatgcgatgagccgcattgagaccgcaaggtctctttttttatgtctaaaacgtcaaaataaaaagcaaacacaaagaaaaatggcttggcgaagtgaaaacgtttgaatctgacgaaacgagaaaagagcgcaacgagtttagtagagctaaatgagtaagcgagagccgaagaagaggaaagaagcaagcgattgtcacaagtcaagaaaggtctttagcgacgatggtagccaacttacgttccgctagagtagaacgttgccaggcaagttgagaccgtgaggtctctttttttatgtctaaaacgtcaaaataaaaagtaaacacaaagaaaaatggcttggcgaagtgaaaacgtttgaatctgacgaaacgagaaaagagcgcaacgagtttagtagagctaaatgagtaagcgagagccgaaggagaggaaagaagcaagcgattgtcacaagtcaagaaaggttcttagcgaggatggtagctaacttacgttccgctagagtagaacgttgctagacaagaaatgaatgcgatgagccgcattgagtgtgaaattgatattttaataatgtgcacttttgattatttaaatctgtgactagaagtataagtgaagacattcagaagtattataaaaagtgaacagcagtaagatagtttttaatcataaatcatcttactgctgtttttagattttatgtctaatatcttttaaatcgaagtacaaaaaggaaattaattattatacaatagacaagctattgcataagtaacactaacttttgtcaaagaagtgttactatataattaatacttttgaaagtaactaattccaaaacagtgtaaataaaggaagcgtatatcatgaagcaacctattttaaataaattagaaagtttaaatcaagaagaagcgatttctttgcatgttccgggtcataaaaatatgactatcggtcatttatctcaattatcaatgacaatggataaaactgaaatacctggattagatgatttacatcatcctgaagaagtcattttggaaagtatgaagcaggtggagaaacattcagattatgatgcttatttcttagtgaatggcaccacttcaggaatattatctgtcatccagtctttttcacagaaaaaaggcgatatcttaatggcaagaaatgtacataaatctgtgttacatgcgctcgatattagccaacaagaagggcattttattgaaacgcatcaaagtccgttaacgaatcattataataaagttaatttaagccgtttgaataatgacggtcacaaacttgctgtgttgacttatcctaactattacggtgaaacatttaatgtagaagaggttatcaaatctttgcaccaattaaatattcctgtactcattgacgaagcacacggcgcgcactttggattgcaaggatttccagattctacattaaattatcaagctgactatgttgttcaatcttttcataaaacgttaccagctttaacgatgggctcggtactttatattcataaaaatgcaccttatagagaaactattatagaatatctaagctacttccaaacatctagtccttcgtatttgattatggctagtttagagtcagctgccgagttctataaaacatatgatagtaccgtgttttttgataagagagcgcaattaatcgaatgtttggagaagaagggttttgaaatgcttcaagttgatgatccgttgaagttgctgataaaatatgaaggttttacaggtcatgatattcaaaattggtttatgaatgcacatatctatttagaattagcggacgactatcaagcattagcgatattgccgttatggcatcatgatgatacgtatttatttgattcgcttttacgtaaaattgaagatatgattttaccgaaaaaatcagtttctaaagttaaacaaacacaacttttaacaactgaaggtaactataaaccaaaacgctttgaatatgttacttggtgtgatttgaaaaaggcaaaaggtaaagttctggcgcgacatattgtcccgtatccgccagggattcctattattttcaaaggagaaacaataactgaaaatatgatagaattggtaaatgaatatctggaaactggaatgatagttgaaggaattaaaaataataaaattttagttgaggatgaataaaatgtcagcttttataacttttgagggcccagaaggctctggaaaaacaactgtaattaatgaagtttaccatagattagtaaaagattatgatgtcattatgactagagaaccaggtggtgttcctactggtgaagaaatacgtaaaattgtattagaaggcaatgatatggacattagaactgaagcaatgttatttgctgcatctagaagagaacatcttgtattaaaggtcataccagctttaaaagaaggtaaggttgtgttgtgtgatcgctatatcgatagttcattagcttatcaaggttatgctagagggattggcgttgaagaagtaagagcattaaacgaatttgcaataaatggattatatccagacttgacgatttatttaaatgttagtgctgaagtaggtcgcgaacgtattattaaaaattcaagagatcaaaatagattagatcaagaagatttaaagtttcacgaaaaagtaattgaaggttaccaagaaatcattcataatgaatcacaacggttcaaaagcgttaatgcagatcaacctcttgaaaatgttgttgaagacacgtatcaaactatcatcaaatatttagaaaagatatgatataattgttagaagaggtgttataaaatgaaaatgattatagcgatcgtacaagatcaagatagtcaggaacttgcagatcaacttgttaaaaataactttagagcaacaaaattggcaacaacaggtgggtttttaagagcgggtaatacaacattcttatgtggtgtcaatgatgaccgtgtagatgaaatattgtctgtgattaatcaaacgtgtggtaatagagaacagttggtttcacctattacacctatgggaggcagtgcggattcgtacattccatatccagttgaagttgaagttggcggtgctactgtatttgttatgccagttgatgcattccatcaattttaattctataatacaatcatcaattagagatacttaaaatagtgtattaataagttattaacaattttgggttgcttgactgcgactagttcagatgccaatagatttgatttttgtggttctaaaaataatcacaaatcatggtcgctattgttgcagtaattagttgctctttggcaacctttttatataaaagcaaaagggagtttgtaatgaatggatgaacagcaacaattgacgaatgcatatcattcaaataaattatcgcatgcctatttatttgaaggtgatgatgcacaaacgatgaaacaagttgcgattaattttgcaaagcttattttatgtcaaacagatagtcaatgtgaaacaaaggttagtacatataatcatccagactttatgtatatatcaacaactgagaatgcaattaagaaagaacaagttgaacaacttgtgcgtcatatgaatcaacttcctatagaaagcacaaataaagtgtacatcattgaagactttgaaaagttaactgttcaaggggaaaacagtatcttgaaatttcttgaagaaccaccggacaatacgattgctattttattgtctacaaaacctgagcaaattttagacacaatccattcaaggtgtcagcatgtatatttcaagcctattgataaagaaaagtttataaatagattagttgaacaaaacatgtctaagccagtagctgaaatgattagtacttatactacgcaaatagataatgcaatggctttaaatgaagaatttgatttattagcattaaggaaatcagttatacgttggtgtgaattgttgcttactaataagccaatggcacttataggtattattgatttattgaaacaggctaaaaataaaaaactgcaatctttaactattgcagctgtgaatggtttcttcgaagatatcatacatacaaaggtaaatgtagaggataaacaaatatatagtgatttaaaaaatgatattgatcaatatgcgcaaaagttgtcgtttaatcaattaattttgatgtttgatcaactgacggaagcacataagaaattgaatcaaaatgtaaatccaacgcttgtatttgaacaaatcgtaattaagggtgtgagttagatgccaaatgtaataggtgttcagtttcaaaaagcgggaaaattagaatattatacacctaatgatatacaagtagatatagaagactgggtagttgtcgaatctaaaagaggcatagagataggtattgttaaaaatccattaatggatattgctgaagaggatgttgtgttacctcttaaaaatattattcgcattgctgatgacaaagatattgataaatttaattgtaatgaacgagatgctgaaaatgcattaatactatgtaaagacattgtaagagaacaaggtttggacatgcgtttagtcaattgcgaatatacattagataaatcgaaagttatttttaattttacggcggatgatcgtattgattttagaaaattagtaaaaatattagcgcaacatttaaaaacacgtatcgagttgagacaaattggtgtaagggatgaagccaaattgcttggcggtatcggatcttgtggtaggtcgttatgttgttctacatttttaggggattttgaaccagtatcgattaagatggctaaggatcaaaatttatcattaaatccaactaaaatttctggtgcatgtggtcgtttgatgtgttgtttaaaatatgaaaatgactattatgaggaagtacgtgcacaattacctgatattggtgaagcaattgaaacgcctgatggtaacgggaaagtagttgctttaaatatattagacatttctatgcaggtgaagcttgagggacatgaacagccacttgaatataaattagaagaaatagaaactatgcattaaggaggcattattacatttggatcgcaatgaaatatttgaaaaaataatgcgtttagaaatgaatgtcaatcaactttcaaaggaaacttcagaattaaaggcacttgcagttgaattagtagaagaaaatgtagcgcttcaacttgaaaatgataatttgaaaaaggtgttgggcaatgatgaaccaactactattgatactgcgaattcaaaaccagcaaaagctgtgaaaaagccattaccaagtaaagataatttggctatattgtatggagaaggatttcatatttgtaaaggcgaattatttggaaaacatcgacatggtgaagattgtctgttctgtttagaagttttaagtgattaatcaagcacactcaaatagtgttataattataaatgaatatggtttggataagtctgagacaatgcatgtttcaggctttaattgtgtataaagttttggtgattgcataagagatggcggtactaaatgttattattaagtgtgcacgcagtatcattagttataaaatgtagctgttaaaagtcaaaaatacatcgaatgtagttaggcatataatataaaaagagttttcaattactcaatagaaaaaggttgtcttcataggagttaaaaatgttaaaagagaatgaacgatttgatcaactaatcaaagaagattttagtattattcaaaatgatgatgttttttcattttcaacggatgctttgttgttagggcattttacaaaacctagaacaaaagatattgtgttggacttatgttcaggcaatggggtgatacccttgttattgtttgcgaaacatccacgacatatagaaggtgttgagattcaaaaaacacttgtcgatatggcgcgacgcacatttcaattcaatgatgttgatgaatatttaacaatgcatcacatggatttgaaaaacgttactaaagtatttaaaccttcacaatatactttagtaacgtgtaatccgccttattttaaagagaatcagcaacaccaacatcaaaaagaagcacataagatagcgagacatgagattatgtgtacacttgaagattgcatgattgcagcccgtcatttattaaaagaaggtggcaggctaaacatggtacatcgtgcagagagactaatggatgtcttgtttgaaatgagaaaagtgaatattgaacctaagaaagtcgtttttatatatagtaaagtagggaaatcagcacaaacgatagtagtagaaggtcgaaaaggtggaaatcaaggtttagaaatcatgcccccattttatatttataatgaagatggtaattatagcgaagaaatgaaggaagtatattatggatagtcattttgtatatattgtaaaatgtagtgatggaagtttatatacaggatacgctaaagacgttaatgcacgtgttgaaaaacataaccgaggtcaaggagccaaatatacgaaagtaagacgtccggtgcatttagtttatcaagaaatgtatgagacaaagtctgaagcattgaagcgtgaatatgaaattaaaacttataccagacaaaagaaattgcgattaattaaggagcgatagtatggctgtattatatttagtgggcacaccaattggtaatttagcagatattacttatagagcagttgatgtattgaaacgtgttgatatgattgcttgtgaagacactagagtaactagtaaactgtgtaatcattatgatattccaactccattaaagtcatatcacgaacataacaaggataagcagactgcttttatcattgaacagttagaattaggtcttgacgttgcgctcgtatctgatgctggattgcccttaattagtgatcctggatacgaattagtagtggcagccagagaagctaatattaaagtagagactgtgcctggacctaatgctgggctgacggctttgatggctagtggattaccttcatatgtatatacatttttaggatttttgccacgaaaagagaaagaaaaaagtgctgtattagagcaacgtatgcatgaaaatagcacattaattatatacgaatcaccgcatcgtgtgacagatacattaaaaacaattgcaaagatagatgcaacacgacaagtatcactagggcgtgaattaactaagaagttcgaacaaattgtaactgatgatgtaacacaattacaagcattgattcagcaaggcgatgtaccattgaaaggcgaattcgttatcttaattgaaggtgctaaagcgaacaatgagatatcgtggtttgatgatttatctatcaatgagcatgttgatcattatattcaaacttcacagatgaaaccaaaacaagctattaaaaaagttgctgaagaacgacaacttaaaacgaatgaagtatataatatttatcatcaaataagttaatcactttatcgattatatgaaattttaaacgattttataaacgcaagctgtaattttaaatggtaagttatcattttgcattgatactgataaaatgatgttgactatgataaaaaaatgatgacatcgacgttttttaatgtaaaataaatacattgaaagtaataaataccttaacattgaataagatgaaaatgagatgacgagataaatgttcgcgtccgttgaaatgcatagaaatcttagatattatttgaagtgagacattacgaggaggaacagttatggctaaagaaacattttatataacaaccccaatatactatcctagtgggaatttacatataggacatgcatattctacagtggctggagatgttattgcaagatataagagaatgcaaggatatgatgttcgctatttgactggaacggatgaacacggtcaaaaaattcaagaaaaagctcaaaaagctggtaagacagaaattgaatatttggatgagatgattgctggaattaaacaattgtgggctaagcttgaaatttcaaatgatgattttatcagaacaactgaagaacgtcataaacatgtcgttgagcaagtgtttgaacgtttattaaagcaaggtgatatctatttaggtgaatatgaaggttggtattctgttccggatgaaacatactatacagagtcacaattagtagacccacaatacgaaaacggtaaaattattggtggcaaaagtccagattctggacacgaagttgaactagttaaagaagaaagttatttctttaatattagtaaatatacagaccgtttattagagttctatgaccaaaatccagattttatacaaccaccatcaagaaaaaatgaaatgattaacaacttcattaaaccaggacttgctgatttagctgtttctcgtacatcatttaactggggtgtccatgttccgtctaatccaaaacatgttgtttatgtttggattgatgcgttagttaactatatttcagcattaggctatttatcagatgatgagtcactatttaacaaatactggccagcagatattcatttaatggctaaggaaattgtgcgattccactcaattatttggcctattttattgatggcattagacttaccgttacctaaaaaagtctttgcacatggttggattttgatgaaagatggaaaaatgagtaaatctaaaggtaatgtcgtagaccctaatattttaattgatcgctatggtttagatgctacacgttattatctaatgcgtgaattaccatttggttcagatggcgtatttacacctgaagcatttgttgagcgtacaaatttcgatctagcaaatgacttaggtaacttagtaaaccgtacgatttctatggttaataagtactttgatggcgaattaccagcgtatcaaggtccacttcatgaattagatgaagaaatggaagctatggctttagaaacagtgaaaagctacactgaaagcatggaaagtttgcaattttctgtggcattatctacggtatggaagtttattagtagaacgaataagtatattgacgaaacaacgccttgggtattagctaaggacgatagccaaaaagatatgttaggcaatgtaatggctcacttagttgaaaatattcgttatgcagctgtattattacgtccattcttaacacatgcgccgaaagagatttttgaacaattgaacattaacaatcctcaatttatggaatttagtagtttagagcaatatggtgtgcttaatgagtcaattatggttactgggcaacctaaacctattttcccaagattggatagcgaagcggaaattgcatatatcaaagaatcaatgcaaccgcctgctactaaagaggaaaaagaagagattcctagcaaacctcaaattgatattaaagactttgataaagttgaaattaaggcagcaacgattattgatgctgaacatgttaagaagtcagataagcttttaaaaattcaagtagacttagattctgaacaaagacaaattgtatcaggaattgccaaattctatacaccagatgatattattggtaaaaaagtagcagttgttactaacctgaaaccagctaaattaatgggacaaaaatctgaaggtatgatattatctgctgaaaaagatggtgtattaaccttagtaagtttaccaagtgcaattccaaatggtgcagtgattaaataactgtatttttaaaaattaggagagataattatgttaatcgatacacatgtccatttaaatgatgagcaatacgatgatgatttgagtgaagtgattacacgtgctagagaagcaggtgttgatcgtatgtttgtagttggttttaacaaatcgacaattgaacgcgcgatgaaattaatcgatgagtatgattttttatatggcattatcggttggcatccagttgacgcaattgattttacagaagaacacttggaatggattgaatctttagctcagcatccaaaagtgattggtattggtgaaatgggattagattatcactgggataaatctcctgcagatgttcaaaaggaagtttttagaaagcaaattgctttagctaagcgtttgaagttaccaattatcattcataaccgtgaagcaactcaagactgtatcgatatcttattggaggagcatgctgaagaggtaggcgggattatgcatagctttagtggttctccagaaattgcagatattgtaactaataagctgaatttttatatttcattaggtggacctgtgacatttaaaaatgctaaacagcctaaagaagttgctaagcatgtgtcaatggagcgtttgctagttgaaaccgatgcaccgtatctttcgccacatccgtatagagggaagcgaaatgaaccggcgagagtaactttagtagctgaacaaattgctgaattaaaaggcttatcttatgaagaagtgtgcgaacaaacaactaaaaatgcagagaaattgtttaatttaaattcataaagttaaaagtgagaaagatcaccgccataaatgtaaacgatgctatattcgtttaatatgctatggttctttctcacttttttaaattaaaatatcgtgcatgtggaatacgtgcgatagagatggttagagctttgaaattaagaattgtaggaaggcgttttaaatgaaaatcaatgagtttatagttgtagaaggacgagatgatactgagcgtgttaaacgagctgttgaatgtgatacgattgaaacgaatggtagtgccatcaacgaacaaactttagaagtaattagaaatgctcaacaaagtcgaggcgttattgtattaacagatccagatttcccaggagataaaattagaagtacaattactgaacatgtcaaaggtgttaaacatgcgtatattgatagagaaaaagctaaaaataaaaaagggaaaattggtgttgaacatgccgacttaattgatattaaagaagcgttaatgcatgttagttcaccctttgatgaagcttatgaatcaattgataaatctgtgctaatagagttggggttaattgttgggaaagatgcaaggcgccgtagagaaattttaagtagaaaattgcgaatcggccattccaatggtaagcagttattgaaaaagttaaatgcatttggttataccgaagcggatgtaaggcaagctttagaagatgaatgaggaagtgaaaatgttggataataaagatattgcaacaccatcaagaacgcgagcgttgttagataaatatggctttaattttaaaaaaagtttaggacagaactttttgatagatgtgaatatcattaataatatcattgatgcaagtgatattgatgcacaaactggggtgattgaaattggtccaggcatggggtcattgacagaacaattggccagacatgctaaaagagtattggcatttgaaattgatcaacgtttaatacctgtattaaatgatacactatcaccttatgataatgtgacggtgattaatgaagatattttaaaagcgaatattaaagaagctgttgaaaatcatttacaagattgtgaaaaaataatggttgttgcaaacctgccgtactatattacgacgccaattttattaaatttgatgcaacaagatataccaattgatggctacgtggtgatgatgcaaaaagaagtgggcgaacgcttaaatgctgaagtaggttcaaaagcatatggttcgttatcaattgtcgtacaatactatacagagactagtaaagtattaacggtacctaaatctgtatttatgccaccacctaatgttgattcaatagttgtaaaactgatgcagagaactgaaccgttagtaacagtagataacgaggaagcattctttaagttagcaaaagcagcatttgcacaaagaagaaagacaattaacaataactatcaaaattattttaaagatggtaaacaacacaaagaagtgattttacaatggttggaacaagcaggtattgatccaagacgtcgcggtgaaacgctatctattcaagattttgctaaattgtatgaagaaaagaaaaaattccctcaattagaaaattaaatgattgacaaagcaaagcactattgttaaaatttaaattttgtttgacgaaaacgttgcaaatatggtattatgtaacttgtagcgaggtggagcaatatgccaaaatcaattttggacatcaaaaattctattgattgtcatgtaggaaatcgtattgtactgaaagccaatggaggccgtaagaaaacaataaaacgttctggaattttaaaagaaacatatccgtcagttttcattgttgagttagatcaagacaaacacaactttgagagagtatcttatacatacactgatgtgttaactgaaaatgttcaagtttcatttgaagaggataatcatcacgaatcaattgcacactaaataagacatatagagatgttagacgtttcttagtataagaagtaaatattatgataattatttgagtgttgggcattatgttcaatactctttttatttacaaaatgtttaacactgatgtttcgcttatagatttttcagtaaatggataattgtatttataaacacaaatacaagtaaatactaagtaattagatggagaaaattacttttttattaaaaaaacactaaaaaacaaattaaaatgtcaaatattaattctctttatgttaaaatcatcatattaagataacgaaaagagggcggaaaatgatatatgaaacggcaccagccaaaattaattttacgctcgatacactttttaaaagaaatgatggctatcatgagattgaaatgataatgacaacagttgatttaaatgatcgtttaacttttcataaaagaaaagatcgaaagatagttgttgagattgaacataattatgtgccttctaatcataaaaatctcgcatatcgtgcagcgcaactatttattgagcaatatcaactaaagcaaggtgtaacaatttctatcgataaagaaatacctgtttctgctggcttagctggaggttcggctgatgcagcagcaacgttaagaggattgaatcgactttttgatataggggcgagtttggaagaattggctctactaggcagtaaaatcgggacagatattccgttttgtatttataataaaactgcactatgtactggaagaggagagaaaatcgagtttttaaataaaccaccttcagcttgggtgattcttgctaaaccaaacttaggcatatcatcaccagatatatttaagttgattaatttagataagcgttacgacgtacatacgaaaatgtgttatgaggccttagaaaatcgagattatcaacaattatgtcaaagtttgtctaatcgattagagccaatttctgtttcaaaacacccacaaatcgataaattaaaaaataatatgttgaaaagtggtgcagatggtgcgttaatgagtggaagcggacctactgtgtatgggctagcacgaaaagaaagccaagcaaaaaatatttataatgcagttaacggttgttgtaatgaagtgtacttagttagactattaggatagaagggttgaaaagatgagatataaacgaagcgagagaattgtttttatgacgcaatatttgatgaaccatccgaataaattgattccattaactttttttgtgaaaaaatttaaacaggcgaagtcttcaataagtgaagatgtccaaattataaaaaatacattccaaaaagaaaagttaggtacagtaattactactgctggcgcaagtggtggtgttacgtataaaccaatgatgagtaaagaagaggcgactgaagttgttaatgaggtcattactctattagaagagaaagaacgtttgttacctggcggatatttatttttatcagatttggtaggtaatccatcgctactaaacaaagttggtaagttaattgccagtatttacatggaagaaaaattagatgctgttgttaccattgcgacaaaaggtatttcattggcaaatgcggttgctaatattttaaatttaccagtagtagtgattagaaaagacaacaaggtgactgaaggttctacagtttcaattaattacgtttcaggatcttcaagaaaaatagaaacaatggtactttcgaagagaactttagcagaaaattcaaatgttttagttgtcgatgattttatgagggctggtggctctattaatggtgttatgaatttaatgaatgagtttaaagcccatgtaaaaggggtatcagtatttgtagaatcaaaagaagttaaacaaagattgattgaagattatacttccttagtgaaattatctgatgtagatgaatataatcaagagtttaacgtagaacctggcaacagtttatctaagttttcataaaaggagttttagtattatgaaaatcattaacacaacaagattaccggaagcacttggaccatattcgcatgcaacagttgtgaatggtatggtttatacttctggtcagattccattgaatattgatggacatatcgtaagcgctgatgttcaagcacagacaaaacaagttttagaaaatttaaaggttgttttggaagaagcaggatctgatttgaattctgttgcgaaagcgaccattttcattaaagatatgaatgatttccaaaaaataaatgaagtgtatggtcaatattttaatgaacacaagccagcgcgtagttgtgtagaggttgcgcgtttgccaaaagatgtgaaagtagaaattgaattagtaagtaaaattaaggaattataattttcgattaatatgtttaatcaagcttctaaataaaacagagagatatatactataggggggctcactacatgaaagtgacagatgtaagacttagaaaaatacaaacagatggacgaatgaaagcactcgtttccattacattagatgaagctttcgtaattcatgatttacgtgtaattgaaggaaactctggcttgttcgttgcaatgccaagtaaacgtacaccagatggtgaattccgcgacatcgcgcatcctattaattcagatatgagacaagaaattcaagatgcagtgatgaaagtatatgatgaaacagatgaagtagtaccagataaaaacgctacatcagaagattcagaagaagcttaatcaattttatatttagcgatgtaatacatttgcaataagttgatttgatactgtcgataaagcataaagctttgtcggcagttttttagtttgtattaatgttttttatttttaatgaaaggctaataaatatatacgttaacagattatgatgatatgaaaattattgattcattgctgataaaaattgcgtttgaatgatgctcgtatttttgaagtaagaaaaaagttgtttttaaaattacaacgaattaaaaacaatgccttttatatgttgaaagagtattgcagattaaattataataatgacgaagtgtaaaatttaatgggggttaatgttcatgcgaagacacgcgataattttggcagcaggtaaaggcacaagaatgaaatctaaaaagtataaagtgctacacgaggttgctgggaaacctatggtcgaacatgtattggaaagtgtgaaaggctctggtgtcgatcaagttgtaaccatcgtaggacatggtgctgaaagtgtaaaaggacatttaggcgagcgttctttatacagttttcaagaggaacaactcggtactgcgcatgcagtgcaaatggcgaaatcacacttagaagacaaggaaggtacgacaatcgttgtatgtggtgacacaccgctcatcacaaaggaaacattagaaacattgattgcgcatcacgaggatgctaatgctcaagcaactgtattatctgcatcgattcaacaaccatatggatacggaagaatcgttcgaaatgcgtcaggtcgtttagaacgcatagttgaagagaaagatgcaacgcaagctgaaaaggatattaatgaaattagttcaggtatttttgcgtttaataataaaacgttgtttgaaaaattaacacaagtgaaaaatgataatgcgcaaggtgaatattacctccctgatgtattgtcgttaattttaaatgatggcggcatcgtagaagtctatcgtaccaatgatgttgaagaaatcatgggtgtaaatgatcgtgtaatgcttagtcaggctgagaaggcgatgcaacgtcgtacgaatcattatcacatgctaaatggtgtgacaatcatcgatcctgacagcacttatattggtccagacgttacaattggtagtgatacagtcattgaaccaggcgtacgaattaatggtcgtacagaaattggcgaagatgttgttattggtcagtactctgaaattaacaatagtacgattgaaaatggtgcatgtattcaacagtctgttgttaatgatgctagcgtaggagcgaatactaaggtcggaccgtttgcgcaattgagaccaggcgcgcaattaggtgcagatgttaaggttggaaattttgtagaaattaaaaaagcagatcttaaagatggtgccaaggtttcacatttaagttatattggcgatgctgtaattggcgaacgtactaatattggttgcggaacgattacagttaactatgatggtgaaaataaatttaaaactatcgtcggcaaagattcatttgtaggttgcaatgttaatttagtagcacctgtaacaattggtgatgatgtattggtggcagctggttccacaatcacagatgacgtaccaaatgacagtttagctgtggcaagagcaagacaaacaacaaaagaaggatataggaaataatcatttacgtatttaaaatggctaggataaaaggataatcctatgtaatattaatgtaatctttatgatttaatgattcgcatagtaatggagttacattttatatataatagtaattgcgtaagtaaataattggaggactataaatgttaaataatgaatataagaattcgtcattaaagattttttcattgaaaggaaacgaagcattagcgcaagaagttgctgaccaagtaggaattgaactaggtaaatgttcagttaaacgttttagtgatggagaaattcaaattaatatcgaagagagtattcgtggttgtgacgtatttattattcaaccaacatcatatcctgtgaatctacatttaatggaattattaattatgattgatgcttgtaaacgtgcttctgcagcaacaatcaatattgtagtgccatattatggatatgcaagacaagatagaaaagcccgtagccgtgagccaatcactgctaaattagttgcaaacttaatcgaaacagctggcgcaactcgtatgattgcgttagacttacatgcaccacaaattcaaggattctttgatattccaattgaccacttaatgggtgtgccaattcttgctaaacatttcaaagatgatccgaatattaacccagaagaatgtgtcgttgtttcaccagaccatggcggcgttacacgtgcacgtaaattagctgacattttaaaaactccaattgcaattatagataaacgtcgtcctagaccaaatgttgctgaagtgatgaacattgttggtgagattgaaggacgtacggcaattattattgacgatattattgatacagcaggtacaatcactttagctgcacaagcattaaaagataaaggtgctaaagaagtatatgcttgttgtacacaccctgttttatcaggaccggctaaagaacgtatcgaaaattctgctataaaagaattaatcgtaacaaactcaattcatttagatgaagatcgcaaaccatctaacactaaagaattatctgttgctggtttaatcgcacaagctatcattcgtgtatacgaaagagaatcagttagcgtattatttgactaatatttaaaaggcgtttgacgaacatattccaaacgtgtataatagtttcgttcgtgattatacgaataaataaacacttgcaagcaacgatgatgttgatgggtaagtgaggtgctcgttttgagcaaaaatgaaaggtggaaatgagaatggcttcattaaagtcaatcatccgtcaaggtaaacaaacacgttcagatcttaaacaattaagaaaatctggtaaagtaccagcagtagtatacggttacggtactaaaaacgtgtcagttaaagttgatgaagtagaattcatcaaagttatccgtgaagtaggtcgtaacggtgttatcgaattaggcgttggttctaaaactatcaaagttatggttgcagactaccaattcgatccacttaaaaaccaaattactcacattgacttcttagcaatcaatatgagtgaagaacgtactgttgaagtaccagttcaattagttggtgaagcagtaggcgctaaagaaggcggcgtagttgaacaaccattattcaacttagaagtaactgctactccagacaatattccagaagcaatcgaagtagacattactgaattaaacattaacgacagcttaactgttgctgatgttaaagtaactggcgacttcaaaatcgaaaacgattcagctgaatcagtagtaacagtagttgctccaactgaagaaccaactgaagaagaaatcgaagctatggaaggcgaacaacaaactgaagaaccagaagttgttggcgaaagcaaagaagacgaagaaaaaactgaagagtaattttaatctgttacattaaagtttttatactttgtttaacaagcactgtgcttattttaatataagcatggtgctttttgtgttattataaagcttaattaaactttattactttgtactaaagtttaattaattttagtgagtaaaagacattaaactcaacaatgatacatcataaaaattttaatgtactcgattttaaaatacatacttactaagctaaagaataatgataattgatggcaatggcggaaaatggatgttgtcattataataataaatgaaacaattatgttggaggtaaacacgcatgaaatgtattgtaggtctaggtaatataggtaaacgttttgaacttacaagacataatatcggctttgaagtcgttgattatattttagagaaaaataatttttcattagataaacaaaagtttaaaggtgcatatacaattgaacgaatgaacggcgataaagtgttatttatcgaaccaatgacaatgatgaatttgtcaggtgaagcagttgcaccgattatggattattacaatgttaatccagaagatttaattgtcttatatgatgatttagatttagaacaaggacaagttcgcttaagacaaaaaggaagtgcgggcggtcacaatggtatgaaatcaattattaaaatgcttggtacagaccaatttaaacgtattcgtattggtgtgggaagaccaacgaatggtatgacggtacctgattatgttttacaacgcttttcaaatgatgaaatggtaacgatggaaaaagttatcgaacacgcagcacgcgcaattgaaaagtttgttgaaacatcacgatttgaccatgttatgaatgaatttaatggtgaagtgaaataatgacaatattgacaacgcttataaaagaagataatcattttcaagaccttaatcaggtatttggacaagcaaacacactagtaactggtctttccccgtcagctaaagtgacgatgattgctgaaaaatatgcacaaagtaatcaacagttattattaattaccaataatttataccaagcagataaattagaaacagatttacttcaatttatagatgctgaagaattgtataagtatcctgtgcaagatattatgaccgaagagttttcaacacaaagccctcaactgatgagtgaacgtattagaactttaactgcgttagctcaaggtaagaaagggttatttatcgttcctttaaatggtttgaaaaagtggttaactcctgttgaaatgtggcaaaatcaccaaatgacattgcgtgttggtgaggatatcgatgtggaccaatttcttaacaaattagttaatatggggtacaaacgggaatccgtggtatcgcatattggtgaattctcattgcgaggaggtattatcgatatctttccgctaattggggaaccaatcagaattgagctatttgataccgaaattgattctattcgggattttgatgttgaaacgcagcgttccaaagataatgttgaagaagtcgatatcacaactgcaagtgattatatcattactgaagaagtgatcagccatcttaaagaagagttaaaaactgcatatgaaaatacaagacccaaaatagataaatcagtgcgcaatgatttgaaagaaacgtatgaaagctttaaattattcgaaagtacattctttgatcatcaaatactacgtcgcttagtagcgtttatgtatgaaacaccttcgacaattattgagtatttccaaaaagatgcaatcattgcagttgatgaatttaatcgtattaaagaaactgaagaaagtttaacagtagagtctgattcgtttattagcaatattattgaaagtggtaatggatttataggacaaagttttataaaatatgatgattttgaaacattgattgaaggctatcctgtcacttatttttcattattcgctacaacaatgccgataaaactaaatcatattattaaattttcatgtaaacctgtccaacaattttatgggcaatatgacattatgcgttctgaatttcaacgatatgttaatcaaaactatcatatcgtggttttggtcgaaaccgaaactaaagttgaacgtatgcaagcgatgttaagtgaaatgcatattccatcaataacaaaattgcatcgctcaatgtcatcggggcaagcagtgattattgaaggcagtttatctgaaggatttgaactacctgatatgggattagttgtcattactgagcgtgagctttttaaatcaaaacagaaaaagcaacgaaaacgtacgaaagctatctcaaatgctgaaaaaattaagtcttaccaagatttaaatgtgggagattatattgttcatgtgcatcatggtgttggtagatatttaggtgttgagacgctcgaagtggggcaaacgcatcgtgattatattaaattgcaatataaaggtacggatcaactatttgttccagtagatcaaatggatcaagttcaaaaatatgtagcttcggaagataagacgccaaaattaaataaactcggtggcagtgaatggaaaaaaacaaaagctaaagttcaacaaagtgttgaagatattgctgaagagttgattgatttatataaagaaagagaaatggcagaaggttatcaatatggggaagacacagctgagcaaacaacatttgaattagattttccatatgaacttacgcctgaccaagctaaatctatcgatgaaattaaagatgacatgcaaaaatcgcgtccaatggatcgcttgctatgtggtgatgttggttatggtaaaactgaagttgcagtgagagcagcattcaaagctgtaatggaaggaaagcaggttgcatttttagttcctacaactattttagctcagcaacattatgagacgttaattgagcgtatgcaagattttcctgttgaaattcaattaatgagtcgttttagaacgcctaaagagataaaacaaactaaggaaggacttaaaactggatttgttgacatagttgttggtacacacaaattacttagtaaagatatacagtataaagatttagggctgttgattgtagatgaagaacaacgatttggtgtacgccataaagagcgtattaaaacattaaaacataatgtagatgtactaacattgactgcaaccccaatacctagaacattgcatatgagtatgctaggtgtgcgggatttgtcagtgattgaaacgccgccagaaaatcgtttcccagttcaaacatatgtattagaacagaacatgagttttatcaaagaagctttagaaagagaactatcccgtgatggccaagtgctttatctttataataaagtgcaatccatttatgaaaaacgagaacaactccagatgttaatgccagatgctaacattgcagttgctcatggacaaatgacagagcgcgatttagaagaaacgatgttaagttttatcaataatgaatatgatattttagtaacgacgacgattattgaaacaggtgtcgatgtcccaaatgcaaatactttgatcattgaagatgcagatcgctttggattgagtcagttgtatcaattaagaggtcgtgttggtcgttcaagtcgtattggttatgcatacttcttacatccagcaaataaggtactaactgagactgcagaagatcgattacaagcgattaaagaatttacggagttaggctcaggatttaagattgcgatgcgtgatttgaacattcgtggtgctggtaatttgttaggtaaacaacagcacggctttattgatacagttggatttgatttgtacagtcaaatgttagaagaagctgtaaatgaaaaacgtggtattaaggaaccagaatctgaggtgccagaagtcgaagttgatttaaacttggatgcatatttgccaacagaatatattgcaaatgaacaagctaaaattgaaatttataaaaagctacgaaaaactgaaacatttgatcaaattatcgacattaaagatgaattaattgatcgtttcaatgattatcctgttgaagtagcacgtttgcttgatatagtggaaataaaagtacacgcattacattcaggtatcacgttgattaaagataaagggaaaataattgatattcatttatctgtaaaagccactgaaaatattgatggcgaagtgctgttcaaagcaacacaacctttaggtagaacaatgaaggttggtgttcaaaataatgcaatgacaattactttaacgaaacaaaatcaatggcttgatagtttgaagtttttagttaagtgcattgaagaaagtatgagaatcagtgatgaagcataaagaagcatttaatggcgttgtcgtgttaactgctgcattaattgtcattaaaattctgagtgctgtatatcgaattccatatcaaaatatattaggcgatacaggtttgtatgcatatcaacaagtgtatccaattgtagcattaggaatgatattatcgatgaatgccattcctagtgcaattacacaaaatatagggaagtatcatagtgacgaagcatatgcaaaagcagtcgcttatatacaattagttggtatattattatttattgctatttttgtgtttgcgaacaatattgcacatatgatgggtgatggccatttaacaccaatgattcaagctgcaagtttaagctttatatttataggtatgcttggcgtgttaagaggttattatcaatctgcaaataatatgacagttccggctatttcccaggttatagaacaagttatacgagtaggtattatcattgttactattgttatttttgtagacagaggttggacgatatatgaagcgggaacaattgctattttagcatcaacgataggttttttaggttcttcaatttatttagtagcgcaccgaccttttaagtttaaaatggtaaataacactgcaaagatcgtttggaaacagttcgcactttcggttttgattttcgctatcagtcaattaatcgtaattttatggcaagtgattgatagtgttactattattaagtcacttcaagcgatacgcgtgccattcgatgttgccataactgaaaaaggagtctatgaccgtggtgcatcatttattcagatgggattgattgtaactacaacatttagttttgcgctcattcctctgttaagtgacgcaatcaaaatgaataatcaggtacttatgaatcgttatgcaaatgcgtcattaaagattacgattttaataagtacagcagcgggaataggattaattaatttattgcctttaatgaacggtgtgttttttaagacgaatgatttaaccttaacgttaagtgtttatatgattacggtcatttgtgtatcgttaattatgatggatatggcattattacaagcgcaacatgctgtgagacctatttttgttggtatgacggcaggattggttattaaatttatacttaatatcattttgattcgtttaagtggcattattggtgcgagcattagtactgttgtatcattaattatattcggtacgattatccatattgctgtcacgagaaaataccacttatatgcgatgagacgattttttatcaatgttgttttaggtatggtatttatgtcgattgttgttcaatgcgtgttaaacatagtgacaacacacggtagaatcactggactcattgaattattatgtgcagcagtattaggtatcattgcattgtttttctatatttttagatttaatgttttgacatataaagagttaacttatttaccatttggttcaaagttgtatcaaattaagaaaggaagacgttgatggcacataccattacgattgttggcttaggaaactatggcattgatgatttgccgctagggatatataaatttttaaagacacaagataaagtttatgcaagaacgttagatcatccagttatagaatcattgcaagatgaattaacatttcagagttttgaccatgtttatgaagcacataaccaatttgaagatgtctatattgatattgtggcgcaattggttgaagctgctaatgaaaaagatattgtctatgcggttccgggtcatcctagagttgctgagacaactacagtgaaattactggctttagcaaaggacaatactgatatagatgtgaaagttttaggtgggaaaagctttattgatgatgtgtttgaagcagttaatgtagatccaaatgatggcttcacactgttagatgcgacatcattacaagaagtaacacttaatgttagaacgcatacattgattacgcaagtttatagtgcaatggttgctgctaatttgaaaatcactttaatggaacgatatcctgatgattaccctgttcaaattgtcactggtgcacgaagcgatggtgcggataacgttgtgacatgcccattatatgaattggatcatgatgaaaatgcattcaataatttgacgagtgtattcgtaccaaaaatcataacatcgacatatttgtatcatgactttgattttgcaacggaagtgattgatactttagttgatgaagataaaggttgtccatgggataaagtgcaaacgcatgaaacgctaaagcgttatttacttgaagaaacatttgaattgttcgaagctattgacaatgaagatgattggcatatgattgaagaactaggagatattttattacaagtgttattgcatactagtattggtaaaaaagaagggtatatcgacattaaagaagtgattacaagtcttaatgctaaaatgattcgtagacacccacacatatttggtgatgccaatgctgaaactatcgatgacttaaaagaaatttggtctaaggcgaaagatgctgaaggtaaacagccaagagttaaatttgaaaaagtatttgcagagcattttttaaatttatatgagaagacgaaggataagtcatttgatgaggccgcgttaaagcagtggctagaaaaaggggagagtaatacatgagattagataaatatttaaaagtatcacggttaataaagcgacgtacgctagcaaaagaagtaagtgatcaaggtagaattacaataaatggtaatgttgctaaagctggatcggatgttaaagttgaagatgtgctgacgattcgctttggtcaaaaattagtaacagttaaagtaactgcattaaatgaacatgcatctaaagataacgcgaagggtatgtatgaaatcattgaagagcgtcgacttgaagaagcgtaaattggaggtgacaagcaatgaaaaataaagtagaacatatagaaaatcagtacacgtcgcaagagaacaagaaaaaacaacgtcaaaaaatgaaaatgcgtgttgttcgtaggcgtattacagtatttgcgggcgtattacttgcgataattgttgttttatcaatcttgcttgttgtccaaaaacatcgcaatgatattgatgcacaggagcgaaaagcgaaagaagcacagtttcaaaagcaacaaaatgaagaaattgcgttaaaagaaaagttgaataatctgaatgacaaagattacattgaaaaaattgcgcgtgatgattattacttaagcaacaaaggtgaagtgatttttaggttgccagaagacaaagattcgtctagctcaaaatcttcgaaaaaataaatccaaattgattcaaaattatccgagtatagacattgtgaaaaaatccaaacaaggatataataagggaaaatcgaatcaaatcgggaggatttatttaacatatgtcaatcgaagttggaaataagcttaaaggtaaagtcactggtattaaaaagtttggtgcattcgtagaattacctgaaggaaaaagtggtttagttcacattagtgaagtcgcagataattatgttgaaaacgtagaagagcacctttctgttggtgatgaagtagacgtaaaagtattatctattgctgatgatggaaaaattagtctttcaattaagaaagctaaagaccgtccacgtagacaacatacgagtaaaccaagtcatcaaaaaccagtgcaaaaagccgaagattttgaaaagaaattaagcaatttcttaaaagatagtgaagataaattaacttcaatcaaacgtcaaacagaatctagacgcggtggcaaaggttcaagacgttaattaaaataaataaagactgtttcgataaggaatatatttagaatgatgcgtatcgaataatcgattgcagcgttagacaatctaagactgtttcttaaataaggagcagtctcttttatttgtaatgatataactaagacttataccatttttgaaaattgtaaaagtgaggtgatgttatgcagttaaatagtaatggttggcatgttgatgaccatattgttgtcgctgtttctacaggtattgatagtatgtgtttattgtatcaactactaaatgattataaagatagttatagaaaactaacatgcttacatgtcaatcatggcgttaggtcagcttcaattgaggaagccagatttttagaagcatactgcgaacgtcatcacatcgatttacatatcaaaaagttagatttgtcgcatagtctcgaccgaaataacagcattcagaatgaagctcgaattaaacgttacgaatggtttgatgaaatgatgaatgtattagaagcggatgtattgctaacggcgcatcatttggacgatcaattagaaactattatgtatcgtatttttaatgggaaatcaacacgtaataaactaggatttgatgagttatcgaagcgaaaaggttatcagatttatcgaccacttttagctgtctctaaaaaagaaataaaacaattccaagagagatatcatattccatattttgaagatgaatctaataaagataacaaatatgttagaaatgatattcgtaatagaattattccagctattgatgaaaataatcaacttaaagtatcgcatttattaaaattaaaacaatggcatgatgaacaatatgatattttgcaatattcagctaaacaatttattcaagaatttgtgaagtttgatgaacagtcaaaatatttagaggtttctagacaagcttttaataacttaccaaactcattaaagatggttgtgttggactgcctattatcaaagtattatgagttgtttaatattagtgctaaaacatacgaagagtggtttaaacaatttagtagtaagaaagcacaattcagtattaatctcacggataaatggataattcaaatcgcatatggtaaattaataataatggctaaaaataatggcgatacatattttagagttcaaacaattaaaaagccaggtaattatatttttaacaaatatcgattagagatacattctaatttaccaaaatgtttatttccgcttacagtgagaacacgacaaagtggcgatacatttaaactgaatgggcgcgatggttataagaaagtgaatcgcctgtttatagattgtaaagtgccacagtgggttcgggatcaaatgccaatcgtattggataaacaacagcgcattattgcggtaggagatttatatcaacaacaaacaataaaaaaatggattataattagtaaaaatggagatgaatagcgttatgcataatgatttgaaagaagtattgttaactgaagaagatattcaaaatatctgtaaggaattgggagcacaattaacaaaggattatcaaggtaaaccattagtatgcgtgggtatcttaaaaggctcagcaatgtttatgtcagatttaattaaacgaattgatacccatttatcaattgatttcatggatgtttctagttatcacggaggcactgagtcaactggtgaagttcaaatcattaaagatttaggttcttctattgaaaataaagacgtattaattattgaagatatcttagagactggtactacacttaagtcaattactgaattattacaatctagaaaagttaattcattagaaatagttactttattagataaaccaaaccgtcgtaaagcggacattgaagctaagtatgtaggtaaaaaaataccagatgaatttgttgttggttacggtttagattatcgtgaattataccgaaacttaccatatatcggtacgttaaaacctgaagtgtattcaaattaattttttaatcaatttcagttattattactatgcgtttgagaaataatagtgtagactcaaaaatatgaaaaatgtatttcatatatatttaattttagacaagacatatgtcttgaaaagttgaaaaatatagagattgataaaactaatacgggtgtgaatgacattgatgttaagctcaattactagcttataaaacatgtcatatgttacaatttttgttagttttattatgggaagtaggaggaaatgacgcatgcagaaagcttttcgcaatgtgctagttatcgtaataataggcgttattatttttggtctattttcatatttaaacggtaatggaaatatgccgaaacagcttacatataatcaatttactgagaagttggaaaaaggtgaccttaaaactttagaaatccaaccacaacaaaatgtctatatggtaagtggtaaaacgaaaaatgatgaagactattcatcaactattttatataacaacgaaaaagaattacaaaaaattactgatgctgctaaaaagcaaaacggtgtaaaattaacgattaaagaagaagaaaaacaaagtgtctttgtgagtatactttcaacattaattccagttgtagtcatagcgttattatttattttcttcctaagccaagcacaaggtggcggtagtggcggtcgtatgatgaactttggtaaatctaaagcaaaaatgtacgataataataaacgtcgtgttcgtttctctgatgtagcaggggcagatgaagaaaaacaagaattaattgaaattgttgatttcttgaaagataataaaaaattcaaagaaatgggatctaggattcctaaaggtgtcttacttgttggacctccaggtactggtaaaacattacttgctagagcggttgcaggtgaagctggcgcaccattcttctctattagtggttcagactttgtagagatgtttgttggtgttggtgcgagccgtgttcgtgacttattcgataatgctaagaaaaacgcgccttgtatcatctttatcgatgagattgatgctgttggtcgtcaacgtggtgcaggtgttggtggcggtcatgatgaacgtgaacaaaccctaaaccaattattagttgaaatggatggtttcggtgaaaatgaaggtatcattatgatagctgctacaaaccgtcctgatatccttgacccagccttattacgtccaggtcgttttgatagacaaattcaagttggtcgtccagatgtgaaaggccgtgaagcaattcttcatgttcatgctaaaaacaaaccacttgatgaaacggttgatttaaaagcaatttcacaacgtacacctggtttctcaggtgctgatttagagaacttattaaatgaagcatctttaattgctgtacgtgaaggtaaaaagaaaattgacatgagagatatcgaagaggcaacggatagagttatagccggacctgctaagaaatctcgagttatttctaagaaagaacgtaatattgttgctcatcacgaagctggtcatacaattatcggtatggtacttgatgaggcagaagtagtgcataaagttactattgttccacgtggacaagcaggtggttatgcaatgatgctacctaaacaagatcgtttcttaatgactgaacaagagttattagataaaatctgtggtttacttggtggacgtgtatcagaagatattaactttaacgaagtatcaacaggtgcttcaaatgacttcgaacgtgcaacacaaatcgcacgctcaatggttacgcaatatggtatgagtaaaaaattaggaccattacagttcggtcatagcaatggtcaagtattcttaggtaaagatatgcaaggtgagcctaattattcaagccaaatcgcatatgaaattgataaagaagttcaacgaatcgttaaagaacaatacgaacgttgtaaacaaattttattagagcacaaagaacaattaattttaattgctgaaacattattaacagaagaaacattagttgctgaacaaattcaatcattattctacgaaggtaaattacctgaaattgattatgatgcagctaaagttgttaaagatgaagattctgaatttaatgatggtaaattcggtaaatcttatgaagagattcgtaaagagcaattagaagatggacaacgtgacgaaagtgaagatcgtaaagaagaaaaagatattgctgaggataaaaaagaagctgataaatctgatgaaaaagatgaaccagcacatcaacaagccccaaatatcgaaaaaccttacgatccaaatcacccagacaataaataatcgattatattcagtacctctttctatgataaagttatagaaagaggtacttttatcgtttttgaaaatacgtattagattttaagtcgttgaattgttatagcagaaaataattgtaaaacaagttacttcattatttagaatgatgggtgtagaataagtacaattgttgcattttatgaagtaaagtaattttttaaatatagagtaatagaggagattgaaataatgacacacgattatattgttaaagcattagcatttgatggagagattagggcttatgctgctttgacaactgaaactgttcaagaagcacaaacgagacattatacatggccgacagcatctgctgcaatgggaagaacaatgacagcaacagctatgatgggcgcaatgttgaaaggtgatcaaaaattaactgtcactgtagatggccaaggacctattggacgaattattgccgatgcaaatgctaaaggcgaggtgcgtgcttatgtagaccatccacaaactcattttccattaaatgagcaaggtaaacttgatgtaagacgagcggtagggacaaatggatctattatggttgttaaagacgttggaatgaaagactatttctctggagcaagtccaattgtttcaggagaacttggtgaagattttacttattattatgctacaagtgaacaaacaccttcatcggtaggtcttggtgtattggtaaatcctgataatacgattaaagcagcaggaggatttatcattcaagttatgccaggtgccaaagatgaaacaatttcaaaattagaaaaagcaattagtgaaatgacaccagtttctaaattaattgaacaaggattaacgccagaaggattactaaacgaaatcttaggtgaagaccatgtgcaaattttagagaaaatgcctgttcaatttgaatgtaattgtagtcatgagaaatttttaaatgctattaaaggattgggcgaggctgagattcaaaatatgattaaagaagatcatggtgctgaagcagtatgtcatttctgtggaaataaatataaatatactgaagaagaattaaacgtgttgctagaaagtttagcgtaatttaatttaaatcaatacgctaaaatgtttatttttagcggtttagtgaaatgtagaactaaatagttgtataatccttagtgattttgtttgctttctagaatttatttgataaaataattctatatccgataaataaactaagatttcaacaactaactaaaaaggagtgttcttaatggcacaaaaaccagtagataatattactcaaattattggcggtacaccggtagtcaaattgagaaatgtagtagatgacaatgcagcagatgtttatgtaaaattggaatatcaaaatccaggtggttctgtaaaggatagaattgctttagcaatgattgaaaaagcagagcgagaaggcaaaattaaacctggcgatacaattgtagaaccaacaagtggtaatacaggtatcggtttagcatttgtatgtgctgctaaaggatataaagcagtatttactatgcccgaaacaatgagccaagagcgtcgtaatttattaaaagcatacggtgcggaattagttttaacgcctggatcagaagcgatgaaaggtgcaattaaaaaagctaaagaattgaaagaagaacatggttacttcgagccacaacaatttgaaaaccctgcgaaccctgaagttcatgagttaactacaggtcctgagttattacaacaatttgaagggaaaactatcgatgcgttcctagctggtgttggtactggtggtacgttatctggtgtaggtaaagttctgaaaaaagaatatcctaacatcgaaattgttgctatagagcctgaggcttctccagtattgagcggtggtgagccaggtccacataaattacaaggtttaggtgctggatttattccaggcactttgaatacagaaatctatgacagtattattaaagtaggaaatgatacagcgatggaaatgtctcgtcgagttgctaaagaggaaggtattttagcaggtatttcatcaggtgctgcgatttatgctgccattcaaaaagcaaaagaattaggaaaaggtaaaacagtagtaacagtattgccgagtaatggtgaacgctacttatcaacacctttatattcattcgatgactaattaatgtcatttaaaagagtgagttatctttttgagataacttgctctttttttctaccatgtatatttttaaaaatatgagcgttaaattaaacatttttctgataaaaatatccagtgaatgataagataataaacgtacatactaataactagtaaatagcaggagtaaattttattagagttaaacaatacataattaaagggtggttaacatgactaaaacaaaaattatgggcatattaaacgtcacacctgattcactctcagatggtggaaaatttaataatgttgaatcagctataaatagagtgaaagccatgatagatgaaggtgctgacattatagatgttggaggtgtttcaacgagacccggtcatgaaatggtttcattagaagaagagatgaacagagtattacctgttgttgaagctattgtcggttttgatgtaaaaatttcagtcgatacatttcgaagtgaggttgctgaagcatgtttaaaattaggcgttgatatgattaatgatcaatgggcgggtctgtatgatcatcgtatgttccaaattgtagctaaatatgacgcggaaattattttaatgcataatggaaatggtaatcgtgatgaaccggttgtcgaagaaatgttaacatctttgttagcacaagcacatcaagctaaaatagctggtataccttcaaataaaatttggctagatccaggtataggtttcgctaaaactagaaatgaagaagccgaagttatggcaagactggatgaacttgttgcaacagaatatccagttttattagcgacaagccggaaacgtttcactaaagagatgatgggttatgatacaacaccggttgaaagagatgaagtaactgcagctacgactgcatatggtattatgaaaggcgttagagcagtacgcgttcataatgtcgagttgaatgctaaattagctaaaggtatagattttttaaaggagaaggagaatgaaaatgcaagacacaatctttcttaaaggtatgcgcttttatggatatcatggtgctttatcagctgaaaatgaaatagggcaaattttcaaagtggatgtaactttgaaagtagacttagctgaagctgggcgtactgataatgttattgatacagttcattatggtgaagtgttcgaagaggttaaatcaattatggaaggtaaggccgttaatttacttgagcatctagctgaacgtattgcaaatcgtataaattcacaatataatcgtgtaatggaaacgaaagtgagaatcactaaagaaaacccaccgattccgggtcattatgatggagtaggtatcgaaatagtgagggagaataaatgattcaagcatacttaggattaggtagtaatattggtgatagagaaagccagttaaacgatgctataaagattttgaatgaatatgatggtattaacgtatctaatatttctccgatttatgaaacagcaccagttgggtatactgagcaacctaactttttaaatttgtgtgttgaaattcaaacaacactcacagtattacaactgttggaatgttgtttgaagacagaagaatgtttacaccgtattagaaaggaacgatggggtcctagaactttagatgtggatattttgttgtatggagaagaaatgatagatttaccaaaactgtcggtgccacatccgagaatgaatgaacgtgcatttgttttaatcccattaaatgatatagcagcaaatgtcgtagaaccacgttcgaaattgaaagtgaaagatttagtttttgtcgatgacagtgtaaagagatataaataatgtattgttgagaacattcatatttattgggaatagattattgattattggagatgtttccgcattttgattatctctaaatgcatttgatttcgaattagtatatgatgatttagtatgtgttagaattaagttatttcataaaatcaaagtaagcaatatttgataaattgctgtaatttatttaggcttttgttgaagtttgtggaagataatttttatacatttacttagggttgtattaatgataatcgtattttaaatgaataagtaattcataaacgaaaacagaaattgctttattacatttacaagctcttgtaaaattaaaaaagtgataaaattgatgttatgaatataagaaaacatgccacatcataactttaaggtgtaatggttaatgataaagtattagaaacatcgaaagagatgtatgttgagcaaaaatgtctgatattttataaaactttaaaggaaaatgtttgagtgtaccagttggaatactaaaggattacaacaagttaaaggagagaaagttatgtcagaagaaatgaatgaccaaatgttggttcgacgtcaaaaattacaagaattatatgatcttggtatagacccgtttggttctaaatttgaccgttcaggtttatctagtgatttgaaagaagagtgggaccagtattctaaagaagaattggtagaaaaagaagcggatagtcatgtcgctatagctggacgattaatgactaagcgtggtaaaggtaaagcaggatttgcacacgttcaggacttagctggacaaattcaaatttacgttcgtaaagatcaagttggcgatgacgaatttgatttatggaaaaatgctgatttaggcgatatcgttggtgttgaaggtgtaatgttcaaaacaaatactggcgaattatcggttaaagcgaagaaattcacgctactaactaaatcattgcgaccattaccggataaattccacggtttacaggatattgaacagagatatcgtcaaagatatttagatttaattacgaacgaagatagcactcgtacatttattaatcgtagtaaaatcattcaagaaatgcgtaattatttaaataataaaggtttcttggaagtagaaacacctatgatgcaccaaattgctggtggagcagctgctagaccatttgtaacacatcataatgcattagatgcaacgttatacatgcgtattgctattgagttgcatttaaaacgtttaattgtcggtggacttgaaaaagtatatgaaattggtagagtattccgtaatgaaggtgtatcaactagacataaccctgaattcacaatgattgaattatatgaagcatatgcagattatcatgacattatggatttaacagaatctatggtgagacatattgccaatgaagtgttaggttctgcaaaagtacaatacaatggggaaacgattgatttagaatctgcttggactcgtttgcatattgttgatgctgtaaaagaagctactggtgtagatttttatgaagttaaaagtgatgaagaagctaaagctttagctaaagaacatggtattgaaattaaagatacaatgaaatatggtcatattttaaatgaattctttgagcaaaaagttgaagaaacacttattcagccaacgtttatctatggtcatccgactgaaatttcacctttagcgaagaaaaatcctgaagatcctagatttactgatcgtttcgaattgttcattgtaggtagagagcatgcaaatgcatttactgaattaaatgatcctattgatcaaaaaggtcgttttgaagcgcaacttgttgaaaaagcgcaaggtaatgatgaagcgcatgaaatggatgaagattacattgaagcgttagaatatggtatgcctccgacaggtggtcttggtatcggtattgacagattggttatgttattaactgactctccatcaatcagagacgtattattattcccttatatgagacaaaaataaatgacgttgattgttagtaagagctctcgtgtatacaacatgtgtatgcgagggctttcttaattatggtaattagttcgtgtttgaatgtttttgatagtaatagttaacgatagtggtgctatttttgactgttaaacaaggtagttggctgatagatgaaaatgacgatacgtatatagagtagttcggatgagaaatgttaacgatagacattgagatatcttataacaaaaattgctatattagtataatttatcttaatcagctataaaagtactttaaaattgtatagaatgtgtatggttttgtacatatgtgtatgatagaatactaaaagtgttatgaattagagggcacgagaaatgtcagttttgaagaataaaaaagttgattaaaagtgttgactttatcaattgaatgaagtaatatataaaagtcgtcaaaaacagacgaaacacactaaaagctgatgtgacaaagtttacatcaaagtgtaaaattaactattgcaccttattaattaagcgtgtatcatgaataagtaagttattttgtctggtgactatagcaaggaggtcacacctgttcccatgccgaacacagaagttaagctccttagcgtcgatggtagtcgaacttacgttccgctagagtagaacgttgccaggcaaatgacaaatcggagaattagctcagctgggagagcatctgccttacaagcagagggtcggcggttcgaacccgtcattctccaccatttattcttagatatagccggcctagctcaattggtagagcaactgacttgtaatcagtaggttgggggttcaagtcctctggccggcaccatcttttgagccattagctcagctggtagagcatctgacttttaatcagagggtcagaggttcgaatcctctatggctcattacgatttaatttttatatttagcaaaataatgcagaagtagttcagcggtagaatacaaccttgccaaggttggggtcgcgggttcgaatcccgtcttctgctccattattttgccggggtggcggaactggcagacgcacaggacttaaaatcctgcggtgagagatcaccgtaccggttcgattccggtcctcggcaccattttagcgcccgtagctcaattggatagagcgtttgactacggatcaagaggttatgggttcgactcctatcgggcgcgccatttttaaattaattgaataacgggaagtagctcagcttggtagagcacttggtttgggaccaaggggtcgcaggttcgaatcctgtcttcccgattacttcttaaattccattttatgggggcttagctcagctgggagagcgcctgctttgcacgcaggaggtcagcggttcgatcccgctagtctccaccatttattttttacacgatgaacattgaaaactgaatgacaatatgtcaacgttaattccaaaaaaacgtaactataagttacaaacattatttagtatttatgagctaatcaaacatcataatttttatggagagtttgatcctggctcaggatgaacgctggcggcgtgcctaatacatgcaagtcgagcgaacggacgagaagcttgcttctctgatgttagcggcggacgggtgagtaacacgtggataacctacctataagactgggataacttcgggaaaccggagctaataccggataatattttgaaccgcatggttcaaaagtgaaagacggtcttgctgtcacttatagatggatccgcgctgcattagctagttggtaaggtaacggcttaccaaggcaacgatgcatagccgacctgagagggtgatcggccacactggaactgagacacggtccagactcctacgggaggcagcagtagggaatcttccgcaatgggcgaaagcctgacggagcaacgccgcgtgagtgatgaaggtcttcggatcgtaaaactctgttattagggaagaacatatgtgtaagtaactgtgcacatcttgacggtacctaatcagaaagccacggctaactacgtgccagcagccgcggtaatacgtaggtggcaagcgttatccggaattattgggcgtaaagcgcgcgtaggcggttttttaagtctgatgtgaaagcccacggctcaaccgtggagggtcattggaaactggaaaacttgagtgcagaagaggaaagtggaattccatgtgtagcggtgaaatgcgcagagatatggaggaacaccagtggcgaaggcgactttctggtctgtaactgacgctgatgtgcgaaagcgtggggatcaaacaggattagataccctggtagtccacgccgtaaacgatgagtgctaagtgttagggggtttccgccccttagtgctgcagctaacgcattaagcactccgcctggggagtacgaccgcaaggttgaaactcaaaggaattgacggggacccgcacaagcggtggagcatgtggtttaattcgaagcaacgcgaagaaccttaccaaatcttgacatcctttgacaactctagagatagagccttccccttcgggggacaaagtgacaggtggtgcatggttgtcgtcagctcgtgtcgtgagatgttgggttaagtcccgcaacgagcgcaacccttaagcttagttgccatcattaagttgggcactctaagttgactgccggtgacaaaccggaggaaggtggggatgacgtcaaatcatcatgccccttatgatttgggctacacacgtgctacaatggacaatacaaagggcagcgaaaccgcgaggtcaagcaaatcccataaagttgttctcagttcggattgtagtctgcaactcgactacatgaagctggaatcgctagtaatcgtagatcagcatgctacggtgaatacgttcccgggtcttgtacacaccgcccgtcacaccacgagagtttgtaacacccgaagccggtggagtaaccttttaggagctagccgtcgaaggtgggacaaatgattggggtgaagtcgtaacaaggtagccgtatcggaaggtgcggctggatcacctcctttctaaggatatattcggaacatcttcttcagaagatgcggaataacgtgacatattgtattcagttttgaatgtttatttaacattcaaaaaaatgggcctatagctcagctggttagagcgcacgcctgataagcgtgaggtcggtggttcgagtccacttaggcccaccattatttgtacattgaaaactagataagtaagtaaaatatagattttaccaagcaaaaccgagtgaataaagagttttaaataagcttgaattcataagaaataatcgctagtgttcgaaagaacactcacaagattaataacgcgtttcctgtaggatggaaacatagattaagttattaagggcgcacggtggatgccttggcactagaagccgatgaaggacgttactaacgacgatatgctttggggagctgtaagtaagctttgatccagagatttccgaatggggaaacccagcatgagttatgtcatgttatcgatatgtgaatacatagcatatcagaaggcacacccggagaactgaaacatcttagtacccggaggaagagaaagaaaattcgattcccttagtagcggcgagcgaaacgggaagagcccaaaccaacaagcttgcttgttggggttgtaggacactctatacggagttacaaaggacgacattagacgaatcatctggaaagatgaatcaaagaaggtaataatcctgtagtcgaaaatgttgtctctcttgagtggatcctgagtacgacggagcacgtgaaattccgtcggaatctgggaggaccatctcctaaggctaaatactctctagtgaccgatagtgaaccagtaccgtgagggaaaggtgaaaagcaccccggaaggggagtgaaatagaacctgaaaccgtgtgcttacaagtagtcagagcccgttaatgggtgatggcgtgccttttgtagaatgaaccggcgagttacgatttgatgcaaggttaagcagtaaatgtggagccgtagcgaaagcgagtctgaatagggcgtttagtatttggtcgtagacccgaaaccaggtgatctacccttggtcaggttgaagttcaggtaacactgaatggaggaccgaaccgacttacgttgaaaagtgagcggatgaactgagggtagcggagaaattccaatcgaacctggagatagctggttctctccgaaatagctttagggctagcctcaagtgatgattattggaggtagagcactgtttggacgaggggcccctctcgggttaccgaattcagacaaactccgaatgccaattaatttaacttgggagtcagaacatgggtgataaggtccgtgttcgaaagggaaacagcccagaccaccagctaaggtcccaaaatatatgttaagtggaaaaggatgtggcgttgcccagacaactaggatgttggcttagaagcagccatcatttaaagagtgcgtaatagctcactagtcgagtgacactgcgccgaaaatgtaccggggctaaacatattaccgaagctgtggattgtcctttggacaatggtaggagagcgttctaagggcgttgaagcatgatcgtaaggacatgtggagcgcttagaagtgagaatgccggtgtgagtagcgaaagacgggtgagaatcccgtccaccgattgactaaggtttccagaggaaggctcgtccgctctgggttagtcgggtcctaagctgaggccgacaggcgtaggcgatggataacaggttgatattcctgtaccacctataatcgttttaatcgatggggggacgcagtagaataggcgaagcgtgcgattggattgcacgtctaagcagtaaggctgagtattaggcaaatccggtactcgttaaggctgagctgtgatggggagaagacattgtgtcttcgagtcgttgatttcacactgccgagaaaagcctctagatagaaaataggtgcccgtaccgcaaaccgacacaggtagtcaagatgagaattctaaggtgagcgagcgaactctcgttaaggaactcggcaaaatgaccccgtaacttcgggagaaggggtgctctttagggttaacgcccagaagagccgcagtgaataggcccaagcgactgtttatcaaaaacacaggtctctgctaaaccgtaaggtgatgtataggggctgacgcctgcccggtgctggaaggttaagaggagtggttagcttctgcgaagctacgaatcgaagccccagtaaacggcggccgtaactataacggtcctaaggtagcgaaattccttgtcgggtaagttccgacccgcacgaaaggcgtaacgatttgggcactgtctcaacgagagactcggtgaaatcatagtacctgtgaagatgcaggttacccgcgacaggacggaaagaccccgtggagctttactgtagcctgatattgaaattcggcacagcttgtacaggataggtaggagcctttgaaacgtgagcgctagcttacgtggaggcgctggtgggatactaccctagctgtgttggctttctaacccgcaccacttatcgtggtgggagacagtgtcaggcgggcagtttgactggggcggtcgcctcctaaaaggtaacggaggcgctcaaaggttccctcagaatggttggaaatcattcatagagtgtaaaggcataagggagcttgactgcgagacctacaagtcgagcagggtcgaaagacggacttagtgatccggtggttccgcatggaagggccatcgctcaacggataaaagctaccccggggataacaggcttatctcccccaagagttcacatcgacggggaggtttggcacctcgatgtcggctcatcgcatcctggggctgtagtcggtcccaagggttgggctgttcgcccattaaagcggtacgcgagctgggttcagaacgtcgtgagacagttcggtccctatccgtcgtgggcgtaggaaatttgagaggagctgtccttagtacgagaggaccgggatggacatacctctggtgtaccagttgtcgtgccaacggcatagctgggtagctatgtgtggacgggataagtgctgaaagcatctaagcatgaagcccccctcaagatgagatttcccaacttcggttataagatccctcaaagatgatgaggttaataggttcgaggtggaagcatggtgacatgtggagctgacgaatactaatcgatcgaagacttaatcaaaataaatgttttgcgaagcaaaatcacttttacttactatctagttttgaatgtataaattacattcatatgtctggtgactatagcaaggaggtcacacctgttcccatgccgaacacagaagttaagctccttagcgtcgatggtagtcgaacttacgttccgctagagtagaacgttgccaggcaaaaaatggatgcgatgagccgcattgagaccgcaaggtctctttttttatgtctaaaacgtcaaaataaaaagcaaacacaaagaaaaatggcttggcgaagtgaaaacgtttgaatctgacgaaacgagaaaagaacgcaacgagtttagtagagctaaatgagtaagtgagagccgaaggagaggaaagaagcaagcgattgtcacaagtcaagaaaggttcttagcgaggatggtagccaacttacgttccgctagagtagaactggaaatgataatttaataatgtacactttcgattgtctaagtatgtacaactttaattttgtgtttatataaatttaaaatgatatcatcgaaaacaaaatattgtataaatagagaagagcagtaagacggtatctaattgaaaatgatcttactgctcttttatatactttattgaaatacaaaaaggaaattaattattatacaatagacaagctattgcataagtaacactaacttttatcaaagaagtgttactttataattaatgattttattagagcgtctacatgcggttttaaagcatcatcgtctataccgccaaagcctaatataaatttaggggttttcttatagtcttgatcatcatcaaaattataaacttgtaattttaactttactttgtttgctctatcaagacactcttgtaatgttaatccattttttactgtaattgtaaaatgcatacccgtttcagcaccttgaatatcaagctgctctttgtaaggtttcaatctttttaaaatataggttagttttctacgataaattcgtctcattttatttaaatgcctttcaaaaccaccggaagatataaacgttgcaataaggttttgcatatgaacaggtacagtgttgccttcaatgtgattttgagaatgatattttttcattatagaatagggtaacaccatatatgcaactcgacagctaggaaaaatagactttgaaaatgtactgatataaatcactttttctcctcttgaatatagaccttgaattgctggaatgggtttgccgaaatatctaaactcggaatcataatcatcttctataataaatcgttcttctttttcttgagcccattgtattaattgagttcgtttttttaagtccatcacatatccagttggaaattgatgggaaggcgttatatatactatatttttttgtgatttaataacttcatctacgtttattccattatcttcaacttcaatttgttcatattcaacttgttttttatctaaaatatttttgattggtggataactaggtttttcgataataaatgttgaagtataaagtaaatcgactaattgatttactaattgttcggtagatgagccaattataatttgattaggatcacaaattacgccacgattagtaaataaataaaatgtcagttgaaaccgcaaatgtaattctccttgaaaatgtcctctacgtaattgatttaaatgatttgtatcataaagatctttggaatactttctgaaaagttctatagggaaatgtttcgtatctatttcatccaaattaaaagcataatcataagcttcatcactcgcttttggtttatatgaatcatcatcaaaaagagaggggataggttgattgtttaaaattgttaaagattcaatttcggacacaaaatatccagagcgaggtcttgaataaatgtaaccttcgtctaatagaagttgatatgcatgctctacggttgtttggctaatagataaatgtttgcttaattgtcttttagaataaaatttatcgccttctttaaattgaccttcaattatttgttttttaatttttcataaagttgatggtataaagtgtttttcaattttataactgacctcctaaatttatcttattttgtacctttttaaatatcagtttatacattacaatgtatttaatcaacttgaaaaggggttttatgtataatgagtaaaattattggatcagacagagtcaaaagaggtatggctgaaatgcaaaaaggcggcgttattatggatgtcgttaatgctgagcaagcaagaattgcagaagaagctggcgcggtagcagttatggcattagaacgagtaccttctgatattagagctgctggtggtgttgcacgtatggcaaaccctaaaattgtagaagaagtaatgaatgctgtttctattccagtcatggctaaagcacgtattggtcatatcactgaagcaagagtattagaggcgatgggtgttgactatattgatgaatcagaagtgttaacaccagcagatgaggaatatcacttaagaaaagatcaatttacagtaccatttgtatgtggatgtcgtaatttaggtgaagctgcgcgtagaattggtgaaggtgctgctatgttacgtactaaaggtgaaccaggtacaggtaatattgttgaagctgtaagacatatgagacaagttaattcagaagttagtcgattgactgtaatgaatgatgatgagattatgacttttgcgaaagatatcggtgcgccttatgaaattttaaaacaaattaaagacaatggtcgtttaccggtagttaactttgcagctggtggcgttgcgactcctcaagatgctgctttaatgatggaattaggtgctgacggtgtattcgttggatcaggtatttttaaatcagaagatccagaaaaatttgctaaagcaattgttcaagcaacaacacattaccaagactatgaactaattggaagattagcaagtgaacttggcactgctatgaaaggtttagatatcaatcaattatcattagaagaacgtatgcaagagcgtggttggtaagatatgaaaataggtgtattagcattacaaggtgcagtacgtgaacatattagacatattgaattaagtggtcatgaaggtattgcagttaaaaaagttgaacaattagaagaaatcgagggcttaatattacctggtggcgagtctacaacgttacgtcgattaatgaatttatatggatttaaagaggctttacaaaattcaactttacctatgtttggtacatgcgcaggattaatagttctagcgcaagatatagttggtgaagaaggataccttaacaagttgaatattactgtacaacgaaactcattcggtagacaagttgacagctttgaaacagaattagatattaaaggtatcgctacagatattgaaggtgtctttataagagccccacatattgaaaaagtaggtcaaggcgtagatatcctatgtaaggttaatgagaaaattgtagctgttcagcaaggtaaatatttaggcgtatcattccatcctgaattaacagatgactatagagtaactgattactttattaatcatattgtaaaaaaagcatagcttaatgtatgctaaatcaacgaattattgatatttatagatttgttgagaagaaaatatctccttcaaacttagctttggaggagttattttttatgtcaaaattaaaaatgataaaaaataaagctatacataagaaaaaaacccttcaaagagactgagaatagtcaaaattttgaaggggttaattcgatgttgatgtatttgttaaataaagaatccagcgattgcagctgaaatgaaagatactagtgttgcaccgaataataatttcaaaccaaagcgggcaactgtatctccttttttgtcattaagtgatttaatcgcacctgaaataataccgatagagctaaagttagcaaatgatactaagaatacagatgtaacaccttttgcgtgttcagataaatcactaagtttaccaagtgcttgcattgctacaaattcgttagataatagttttgtcgccataactgaaccggcttgaactgcatcttgccatggcacaccgactaagaatgcaaatggtgcaaagacaaaaccaattaatgtttggaaatcccaagaaatagcgccacctgaaactgtactaaagatattgcttacaattccatttaatagagcgataatggcaatgtatccgattaacattgcgcctacaatgacagctactttaaatccatctaaaatatattctcctagcatttcgaagaatgattgttgtctttcttcagtttcttcaactaataatttgtcatcttcttcattaactttataagggttaataattgaagcgatgatgaaaccaccaaataagtttaagacaacagccgttacaacatatttaggttcaattaaggtaaagtatgcaccgataattgaagcagaaacagtcgacattgctgaagctgttaatgtgtataaacgttgcttaggtatgtatggtaattgttttttaattgaaataaatacttcagattgtcccaaaattgctgcagcaactgcattgtatgattctaaacgtcccataccattaattttagaaattaagaatcctaaaacattaatgattaaaggtaaaatctttgtgtattgaaggataccgataatcgctgaaataaatacgataggtaataatacactgaagaagaatggtggttgcttaggatcgatatattgaataccaccgaatacaaagttaacaccatctgctgcttttaataataagtagttaaaaccgtttgaaataccaccaataaccttgattcccattgtagttttaagcaagataaatgcaaagataagctgaattgcaagtaaaattcctacatatttccagcgaatatttttcctgtctgagctaaatagaaacgcaagtgctaaaaagaagataattccgataatcccaattagaatatgcatatatttctcattcctttagttttttctacaatctatcatacaataaaatggaagggctaacatcataaatttttgaaaatataaaaacaaattaattgaaaaaggtcaaaataggtcatataatatagtcaaagaaggtcaaaaaggggtgatatacatgcacaatatgtctgacatcatagaacaatacatcaaacgtttatttgaagagtcgaatgaagatgtcgttgaaattcagagagcgaatatcgcacagcgttttgattgcgtaccatcacaattaaattatgtaatcaaaacacgattcactaatgaacatggttatgaaatcgaaagtaaacgtggtggtggtggttacatccgaatcactaaaattgaaaataaagatgcaacaggttatattaatcatttgcttcagctgattggaccttctatttctcaacaacaagcttattatattattgatgggcttttagataaaatgttaataaatgaacgtgaagctaaaatgattcaagcagttattgatagagaaacgctatcaatggatatggtttctagagatattattagagcaaatattttaaaacgtttgttaccagttataaattattactaaatgaaatgaggtgttgaagtgctttgtgaaaattgtcaacttaatgaagcggaattaaaagttaaagttacaagtaaaaataaaacagaagaaaaaatggtgtgtcaaacttgtgctgagggacaccatccgtggaatcaagctaatgaacaacctgaatatcaagaacatcaagataatttcgaagaagcatttgttgttaagcaaattttacaacatttagctacgaaacatggaattaattttcaagaagtagcgtttaaagaagaaaaacgttgcccatcatgtcatatgactttgaaagatattgcacatgttggtaaatttgggtgtgctaattgttatgcaacatttaaagatgacatcattgatatcgtccgcagagttcaaggtggacaatttgagcacgttggaaagacaccacattcttcacataaaaagatagctttaaagcgaaaaatcgaagaaaagaatgaatatttgaaaaaacttattgaaatccaagattttgaggaagcagccattgttagagatgaaattaaagcactaaaagctgagagtgaggtgcaacatgatgacgcataatattcatgataatatcagccaatggatgaaaagtaatgaagaaacaccaattgttatgtcttctagaattcggttagcgcgtaatttagaaaatcatgtgcatccactaatgtatgctactgaaaatgatggatttagagttataaatgaggtacaagatgccttgccaaactttgaattaatgcgtcttgatcaaatggatcaacaaagtaaaatgaaaatggttgcaaagcatttgattagtcctgaactaataaaacaaccagcagccgcagtattagtgaatgacgatgaatctttaagtgtcatgataaatgaagaggaccatattcgtattcaagctatgggaactgacacgacattacaggctttatataatcaagcttcatcaattgatgatgaattagatcgaagccttgatataagttatgatgaacaacttggttatttaactacatgtcctaccaatataggtactggtatgagagcaagcgtgatgctacatttgccaggtctatctattatgaaaagaatgacacggattgctcaaaccattaatcgttttggatatacaatcagaggtatttacggtgaaggttcgcaagtttatggacatacttatcaagtatccaaccaacttacacttggtaaatctgagttagaaatcatagaaacattaacagaagttgttaatcaaatcattcatgaagaaaaacaaatacgacaaaagttagacacttataatcaattagaaacacaagaccgtgtttttcgctcgctaggtattttacaaaactgtagaatgataactatggaagaggcttcttatagattaagcgaagttaaacttggtatagatttaaattacattgaattacaaaactttaaatttaatgaattgatggtagctatacagtcaccatttttattagatgaagaagatgacaaatctgtaaaagaaaaacgagcagatatactaagagaacatataaagtaggaggtcattatttatgttatttggtagattaactgagcgtgcacagcgcgtattagcacatgcccaagaagaagcaattcgtttaaatcattcaaatataggaacagaacacctattattggggttaatgaaagaacctgaaggaattgctgcaaaagtattagaaagttttaatatcactgaagataaagtaattgaagaagttgaaaaattaatcggacatggtcaagatcatgttggtacattgcattatacacctagagctaaaaaagtcattgaattatcgatggatgaagctagaaaattacatcacaattttgttggaacggaacatattttattaggcttgattcgtgaaaatgaaggtgttgcagcaagagtttttgcaaatctagatttaaatattactaaagcacgtgcacaagttgtgaaagctttaggaaaccctgaaatgagtaataaaaatgcacaagctagtaagtcaaataatactccaactttagatagtttagctcgtgacttaacagtcattgccaaagacggtacattagatcctgttataggacgtgataaagaaattacacgtgtaattgaagtattaagtagacgtacgaaaaacaatcctgtgcttattggagagccaggtgttggtaaaactgctattgctgaaggtttagcgcaagccatagtgaataatgaggtaccagagacattaaaagataagcgtgttatgtctttagatatgggaacagtagttgcaggtactaaatatcgtggtgaatttgaagagcgtctgaaaaaggttatggaagaaatccaacaagcaggtaatgtcatcctatttattgatgagttgcatactttagttggtgctggtggtgctgaaggtgctatcgatgcttcgaatattttgaagccggcattagcacgtggtgaattacaatgtattggtgctactacattagatgaatatcgcaaaaatattgaaaaagacgcggctttagaacgtcgtttccaacctgtacaagttgatgaaccttcagtagtagatacagttgctattttaaaaggattaagagatcgttacgaagcacaccatcgtattaatatttcagacgaagctattgaagcagctgttaaattaagtaacagatacgtttcagatcgtttcttaccagataaagcaattgatttaattgatgaagcaagttctaaagtaagacttaagagtcatacgacacctaataatttaaaagaaattgaacaagaaattgaaaaagttaaaaatgaaaaagatgccgcagtacatgctcaagagtttgaaaatgctgctaacctgcgtgataaacaaacaaaacttgaaaagcaatatgaagaagctaaaaatgaatggaagaatgcacaaaatggcatgtcaacttcattgtcagaagaagatattgctgaagttattgcaggatggacaggtatcccattaactaaaatcaatgaaacagaatctgaaaaacttcttagtctagaagatacattacatgagagagttattgggcaaaaagatgctgttaattcaatcagtaaagcggttagacgtgcccgtgcagggttaaaagatcctaaacgaccaattggtagctttatcttccttggaccaactggtgttggtaaaactgaattagctagagctttagctgaatcaatgtttggcgatgatgatgcgatgatccgtgtagacatgagtgaatttatggaaaaacacgcagtgagccgattagttggtgctcctccaggatatgttggtcatgatgatggtggacaattaactgaaaaagttagacgtaaaccatattctgtaattttatttgatgaaattgaaaaagctcatccagatgtatttaatattctattacaagttttagatgatggacatttgacagatacaaaaggacgtacagttgatttcagaaatacaattatcataatgacatcaaacgttggggcacaagaattacaagatcaacgatttgctggattcggtggttcaagtgatggacaagattatgaaacaattcgaaaaacgatgttaaaagaattaaaaaattcattccgtccagaatttttaaaccgtgtagatgatatcattgtattccataaactaacaaaagaagaattaaaagaaattgtaacaatgatggttaataaattaacaaatcgattatctgaacaaaacataaatattattgtaactgataaagcgaaagacaaaatcgcagaagaaggatatgatccagaatatggtgcaagaccattaattagagcgatacaaaaaactatcgaagataatttaagtgaattaatattagatggtaatcaaattgaaggtaagaaagttacagtagatcatgatggtaaagagtttaaatatgacattgctgaacaaacttcagaaactaaaacaccatcgcaagcataattataaaacagtccaaaacaaattaaagttttgggctgtttttttagtagcattgaactatagaaattcgtgaaagtatccatcaacgaaacaatctaataaaacaatcatcaaaggatagttaagaattatatgtaacaagttaatgagcctacagcgatagcataaaggtatgaatttttataaaggttttttgtttgaagatactagcaacttacgtcaaaataaaataggtctatataatattgtgataaatctagagaaaagagtttactaagaaattattaagattttatctttgaaagataccgactatcaacatgatgtaagtttattttataatattcataaaaaataaatctggtaaaacagtttgcgttagtagtcatgttaaaatacaaacaaatgtaactcacatttaatttgtcataatgggaatgtgcgtttaaaatagatttgttcaaaggaaagtggaggtgcaattttggccaagaaaaaagtgatttttgaatgtatggcttgtggttatcaatctcctaaatggatggggaaatgtcctaattgtggcgcttggaatcaaatggaggaaattgttgaaaaagcagccaatcctaaacatggagttaaaaccaaggaattagcaggtaaagtacaaaaattaaatagtattaaacatgaaacaacgccgagagtgttaacagattcagcagaattcaaccgtgtattaggtggaggtattgtgagcggatcgttagtacttattggtggggatccaggtattggtaagtcaacgttacttttacaaatttgtgcatcgttatctcaaaagaaaaaagtactatatattactggagaagaatcgcttagtcagactaaattacgtgcagagcgattagatgaagattcaagtgaattgcaagtattagctgaaacagatcttgaagttatttatcaaacagtaaaagaagaacaacctgatttattagtagtggattcgattcaaacaatatatcatcctgaaatcagctctgcgccaggttctgtttcacaagttcgtgaaagtacacaaagtttaatgaatattgctaaacaaatgaacattgcaacttttatagtgggtcatgtaacgaaagaaggtcaaattgctggcccaagattgctagaacacatggttgatactgtgctttattttgaaggcgatgaacaccacgcatatcgaattttgcgagctgttaaaaaccgttttggttcaacgaatgaaatgggaatcttcgaaatgaagcaaagtggattaaaaggtgtaaataatccatctgaaatgtttttagaagaacgttcaacaaatgttccaggttcaacaattgttgcaaccatggagggaaccagaccacttttaatagaagttcaagcgctggtaactccaacgacttttaacaatccgagacgaatggcaacagggattgatcataatcgattaagtttgttgatggctgttttggaaaagaaagaaaattatctattacaacaacaagatgcttatatcaaagtagctggcggtgtaaagttaacggagccagcagttgatttaagtgtaattgtagcaactgcatctagctttaaagataaagctgtcgacggattagattgctatattggagaagttggtttaacgggtgaggtacgtcgtgtatctcggatagaacaacgcgtgcaagaggctgcaaaactaggtttcaaacgtgtaattattcctaaaaataatataggcggatggacatatcctgaaggtatacaagtaataggtgtaactactgtacatgaagtattgtcatttgctcttcattcataaaacatcaagaaaggaggacattgtgtgaatatcgttaaactaatggttattattatttacttaattattgggagcgcattaggaataattattattcctgaaattgcaaatgatcttggattacaaaactccagctttttaaaaaatcactatgtagatggcattatcggtagtatttttatgttcttaatttttggtgtatttattagacgagttactaacgctataaaaggtttagaacattttattatgcgtagaagtgctgttgaaatactattcgcaacaataggtttaataatcggattacttatttctgttatggtgtcgtttatattagaatcaattggcaactctatttttaatcatttcattcctgtcataattacgatattactatgttatttcggtttccaatttggccttaaaaaacgagatgaaatgttaatgtttttacctgagaatatagcgcgttccatgtcacaacatactaaaagtgctacgccaaaaattatcgacacaagcgcaattattgatggtcgtattttagaagtcattcgttgcggttttatcgatggcaatattttaattccacaaggtgttattaatgaattacaaattgttgcagattcaaatgacagtgttaaacgtgaaaagggtaaaagaggcttagatattttaaatgaattgtatgatttagactatcctacaaaggttatacatccaactaaaacacatagtgatattgatacgatgttattaaaattagcaaaacaatatcatgcaagtattataacgacagatttcaacctaaataaagtttgtcatgtacatggtatcaaagcattaaatgttaatgatttatcagaagcaatcaaacctaatgtacatcaaggtgatcaactgcatattttactgacaaaaatgggtaaggagcctggtcaggcagtaggatatctagatgatggtacgatggtagttgttgataatgctaaaaatcttattggcagtcatgtcaatttagaagtagtcagcttattgcaaacatcttcaggaagaattgtttttgctaaaaaaatcgaagatacagtatcattataaaaactgtagttgacgaaaacaaaatagatattaaaaggtatatgaaatggcgaagtttgtaatttgaagtataactataaataaatgcaaaacatattagttatcaaaaaatacaaatagtgctaatatatcattgaaacaagttcattaagtgttaaattttagatattaataaagttattcttatagcaatcaagacatacaaaattagaatcaattttaacgtatttgaatagttaatttgaagtttaatttcacagtacataatattcatttttaagtcgttgaaatgtttatgtagtgcagtcttgattcttagggatagcttttttaaagtgttgaaaaaacaacagctttctatttaaaatttaagcatattacccagggaattatgttatgattaaacaatgaaattattttaaggtcatgttaaaaagcattgtttcgttttaacaataagacgagttagacatttgttatgacggtcgaagatagcaaatgaacaatttatatgaactaacttgaaaatctgatatttaatttaggagtgaaaaaaatgagcgatcgtataagagtaagatatgcaccaagtccaactgggtatcttcatattggtaatgcaagaacagcattattcaattacttgtatgctaaacattacaacggagattttgtgattcgaattgaagatactgataaaaaacgtaatttagaagatggagaaacatcacaatttgataatcttaaatggttaggattagattgggatgagtctgtagataaagacaatggctacggaccatatcgtcaatctgaacgtcaacatatctaccaaccattaatagatcagttactagcagaagataaagcatataaatgctatatgacagaagaagaattagaagctgaacgtgaagcgcaaatcgctcgtggtgaaatgcctcgctatggtggtcaacatgcgcatttgactgaagaacaacgtcaacaatttgaagcagaaggacgccaaccatcaattcgtttccgagtacctcaaaaccaaacgtattcatttgatgatatggtaaaaggaaatatttcatttgattcaaatggtattggtgactgggttatcgtaaaaaaagatggcattccaacgtacaattttgcagtagctatagatgatcattacatgcaaatttcagatgtaattcgtggtgatgatcatatttcaaacacgcctaaacaaattatgatttatgaagcatttggctgggagccacctcgttttggtcatatgtcattaattgttaatgaagaacgtaaaaagttaagtaaacgtgatgggcaaattttacaatttattgagcaatatcgtgacttaggttatttacctgaagcgttatttaattttattgcgttattaggttggtctcctgaaggtgaagaagaaatcttttctaaagaagaatttatcaaaatctttgatgaaaagcgtttgtcaaaatcaccagcatttttcgataagcaaaaattagcatgggttaataaccaatatatgaaacaaaaagatactgaaacagtattccaattagcattacctcatttaattaaagcaaatttgattcctgaggtgccgtcagaagaggatttatcttggggacgcaaattaattgcgctttatcaaaaagaaatgagttatgccggtgaaattgtacctttatcagaaatgttctttaaagaaatgccagctcttggtgaagaagaacaacaagtgattaatggagagcaagtaccagagttaatgacgcacttattcagtaaattagaagcacttgaaccatttgaagcggctgaaattaaaaagacaattaaagaagttcaaaaagaaacaggaataaaaggcaagcaattatttatgcctattcgtgttgctgtaacaggccaaatgcatggtcctgaattaccaaatacaattgaagtacttggtaaagaaaaagtgctaaaccgtttaaaacaatataagtaatgaaatagacaagatcaaggtagtatatacttgaattttataacgtaaccacatatgataaagttgtattaacaaattacaacaatatgaataaagtattttatataaaacgaaggattagtaattaaatttatacgatgcagagagtgtacggttgctgtgagtacaacgtagaaattaatgaatgcaccttcgtaaaatgaattaaatatataatgagagtgatgagcattaagttgacttagtttccttgataatttggaagcgcccgcaatattattaatgttattcgctaaattcagagtggaaccgtgcggaagcgcctctaacaatacaacttgtatgttagtggtgcttttttgatatttaatttcgcaggtacttcaattatgtatttacgtagttcaatcattgaggaggaaatgatcttgttaaaaagaatgagagacgatataaaaatggtatttgagcaggatccagcggcacgttcaacattagaagtcattacaacgtatgcaggtttacatgcagtttggagtcatttgattgcacataagttatacaaccaaaaaaaatatgttgcagcacgcgcgatatctcaaatttcaagatttttcacaggtatagaaatccatccaggtgctaaaattggaaagcgtctatttatagatcatggtatgggcgttgtaataggagaaacatgtacaattggtgataatgtgacaatctatcaaggcgtgacacttggtgggacagggaaagaaagagggaaaagacacccagatataggagacaatgttttaatagcagccggtgcgaaagttttaggaaatattaaaataaattcaaatgtaaatattggtgcaaattcagttgttttacaatcagttccaagttattcaacggttgttggtataccaggacatattgttaagcaagatggtgttcgagttggaaaaacatttgatcatcgccatctaactgatccaatttatgaacaaattaagcatttagaacgacaacttgaaaagactaggaatggagagattcaagatgattacattatataatacgcttacacgtcaaaaagaagtgttcaagcctatagaaccagggaaagtaaaaatgtatgtatgtggtcctactgtatataactacattcatattggtaacgcaagaccagcaattaattatgacgtagtgagacgttactttgaataccaaggatataatgtagaatatgtatcaaattttacagacgtagatgataaattaattaaacgttctcaagaattaaatcagtctgttcccgaaattgcagaaaaatatatcgctgcttttcatgaagatgttggtgcgttaaatgttagaaaagcgacttcaaatccaagggtaatggaccatatggatgacattattcaatttattaaagatttggtggatcaaggttatgcatatgaaagtggtggcgatgtttactttagaacacgtaaatttgaaggttatggtaaattaagtcatcaatccatagatgacttaaaagtgggtgctcgtatagatgcaggagagcataaagaagatgcacttgattttacattgtggaaaaaagcgaagcctggcgagattagttgggatagcccatttggtgaaggtagaccaggatggcatatagaatgttctgtaatggcatttcatgagctaggacctacaattgatatacatgcgggtggttcagatttacaatttccacatcatgaaaatgaaatagcacaatcagaagcacataatcatgcgccatttgctaattattggatgcataatggtttcattaatattgataatgaaaaaatgagtaaatcactaggcaactttattttagttcacgatattattaaagaagttgatccagatgtactaagattctttatgattagcgtacattatagaagcccaattaactataatctagaattggtagaatcagcacgtagtggactagagcgtattcgcaatagttatcaattaattgaagagcgcgcacaaattgctactaatattgaaaatcaacagacatatattgatcaaattgatgcgattttaaatcgttttgaaacagttatgaatgatgattttaatacagctaatgcaattacagcttggtatgatttagcaaaacttgcgaataaatatgtactagagaacacaacatcaacagaagtaattgataaatttaaagcagtttatcaaattttcagcgatgttttaggtgtaccgttaaaatctaaaaatgcagatgaattattggatgaatatgttgaaaaattaatcgaagagcgtaatgaagcaaggaaaaacaaagattttgcacgagcagatgaaattcgagacatgctgaaatcacaaaacattatattagaagacacacctcaaggggttagatttaaacgtggataatcaacaagataatcacattaaattattgaatccattgaccttagcatatatgggagacgcagtcttagatcaatatgtacgtacctatatcgttttaaagcttaaaagtaagcctaataaactacatcaaatgtctaaaaaatatgtatctgccaaaagtcaggcgcaaacgttagaatatttaatggagcaagaatggtttacagacgaagaaatggatattttgaagcgagggcgtaacgcgaaaagtcatactaaagctaaaaacactgatgttcaaacatatcgtaaaagttcagcgatagaagcagtgataggttttctttatttagaaaaaagagaagaacgattagaggcattattaaataaaataataacaatagtaaacgaaaggtagtgacgatgtggaagatacggttattgttggtaggcatgctgttagagaagcgattattactgggcatccgataaataagatattgattcaagaaggtattaaaaagcaacaaattaatgaaattttaaaaaatgcaaaagatcaaaaaatcattgttcaaactgtaccaaaatctaaattagattttttagcaaatgcaccacatcagggtgttgcagcgcttattgcaccatatgaatatgctgacttcgatcaatttttaaaacagcaaaaagaaaaagaaggtttattgacagtacttatattagacggcttagaagacccacataacttgggatcaattttaagaacagccgatgcaacgggagttgatggtgttattattcctaaacgtcgttcagttacactaacgcaaacagttgcaaaagcctcaacaggtgcaattgaacatgtaccagttattcgagtgacaaatttagctaaaactatcgatgaactaaaagataatggcttttgggtagctggcactgaagctaataatgcaacagattatagaaatctagaagcggacatgtcattggctattgtaattggtagcgaaggacagggtatgagtcgcctagtaagtgataaatgcgatttttatattaagattccaatggttggacatgtaaacagtttgaatgcttcggttgcagcaagtttaatgatgtacgaagtatttcgaaaaagacatgatgttggagaaatataatgaaagaacgttacttaatcattgatggatacaatatgataggacaatcaccaacgctaagcgccattgcaaaagagaatttagaagaagctagaatgcaattaatagatgcaattgcaaattataatgcagttatttcagatgaaattatttgtgttttcgatgcttatgaccaatcgggtgttgaaagagaatacatgtatcatggcgttaaaacgatttttaccaaggaaaaagaaacagctgatagtttcatagaacgttatgtttatgaactttatgacaagcatactaagcatattacagttgtaacaagtgatatgagtgagcaacatgctatctttggatcaggtgcatatagaatatcatctcgcgaaatgtggagagatttaaaagaaaatgaaattgatgtgagtaaatcgttagatgatataagtgaaaacaagccaagaactcgaattccgttatcttctgaaatccttgcagaatttgaaaaaatacgaagaggacatcataagaaatgacatttccgtcatcttgaaattttgaatgtaacaatattaaactaaccttaaattttagatagaaggggttagtttaatatttgaaatacgatttgacaactcaagacagtacaatcaaacgtaacaatgcaataaatgataaagacttcgaaaagttagtaatggatctacaaccattaattattcgacgcatcaaaacatttggatttaatcattatgatttagaagacttatatcaagaaatacttatacggatgtataggtcggtccaaacatttgattttagtggagagcagcctttcacaaattatgttcaatgtttaattacgtctgtaaagtatgattatttgagaaaatatttagctacaaataaaagaatggataatttgattaatgaatatagagttacgtatccatgtgcaataaagcgttttgatgttgaaaacaattatttgaataaattagcaattaaagagttgatttgtcagtttaagtatttgagtgcatttgaaaaagatgtcatgtatttaatgtgtgaacaatataagccgagagaaattgctcaattgatgcatgtaaaagagaaagtgatttataatgccatacaacgatgtaaaaataaaataaaacgttatttcaaaatgatttgaaaagcgccttaggacgtgaattgaattataacgtgttacttactgatggtttgacatttgttataaattttatgtatagtatactggtattataatgaataaaggtgaattattgtgagaaaaatacctttaaattgtgaagcttgtggcaatagaaattataatgttcctaagcaagaaggctcggcaacaagattaaccttaaagaaatattgtccaaaatgtaacgcgcacacaattcataaagaatcgaaataaatacattcgaaataatactttgataatatgttcaaaggatttggaggttgagcagatggctaaaaaagaaagtttctttaaaggcgttaagtctgaaatggaaaaaacaagttggccgacgaaagaagagctatttaaatatactgtaattgtagtttctactgttatattcttcttagtctttttctatgccttagatttaggaattacagcattgaaaaatttattatttcgttagaggagtgaagacatgtctgaagaagttggcgcaaagcgttggtatgcagtgcatacatattctggatatgaaaataaagttaaaaagaatttagaaaaaagagtagaatctatgaatatgactgaacaaatctttagagtagtcataccggaagaagaagaaactcaagtaaaagatggcaaagctaaaacgactgttaaaaaaacattccctggatatgttttagtggaattaatcatgacagatgaatcatggtatgtggtaagaaatacaccaggcgttactggttttgtaggttctgcaggtgcagggtctaagccaaatccattgttaccagaagaagttcgcttcatcttaaaacaaatgggtcttaaagaaaagactatcgatgttgaactcgaagttggcgagcaagttcgtattaaatcaggtccatttgcgaatcaagttggtgaagttcaagaaattgaaacagataagtttaagctaacagtattagtagatatgtttggccgagaaacaccagtagaagttgaattcgatcaaatagaaaagctttaattaacaattaaagttattaaactaaccaaaagataaaaaagagtattgattttttaattagaaaagtgttaaaattatgtggtcgcgcttttagagcgcccatttcgtcacgaaatgttaagagtgggagggcaaaactgagccctgtgaccacatcacgatatcaaggaggtgcacatcgtggctaaaaaagtagataaagttgttaaattacaaattcctgcaggtaaagcgaatccagcaccaccagttggtccagcattaggtcaagcaggtgtgaacatcatgggattctgtaaagagttcaatgcacgtactcaagatcaagcaggtttaattattccggtagaaatcagtgtttatgaagatcgttcatttacatttattacaaaaactccaccggctccagtattacttaaaaaagcagctggtattgaaaaaggttcaggcgaaccaaacaaaactaaagttgctacagtaactaaagatcaagtacgcgaaattgctaacagcaaaatgcaagacttaaacgctgctgacgaagaagcagctatgcgtattatcgaaggtactgcacgtagtatgggtatcgttgtagaataattttacgaatattaaatttgattacatgatttaaacgatgaagcagataacagagataataatgatgaattataaatataatctgaatgactagattaatgattgatttattcataagattaattcttctgttgtctgctcttaacttgcatatagcaagtaatgtgggaggaaattccgctaaaaccactaaaggaggaactataaatggctaaaaaaggtaaaaagtatcaagaagcagctagtaaagttgaccgtactcagcactacagtgttgaagaagcaattaaattagctaaagaaacaagcattgctaactttgacgcttctgttgaagttgcattccgtttaggaattgatacacgtaaaaatgaccaacaaatccgtggtgcagttgtattaccaaacggaactggtaaatcacaaagtgtattagtattcgctaaaggtgacaaaattgctgaagctgaagcagcaggtgctgactatgtaggtgaagcagaatacgttcaaaaaatccaacaaggttggttcgacttcgatgtagtagttgctacaccagacatgatgggtgaagttggtaaattaggtcgtgtattaggaccaaaaggtttaatgccaaaccctaaaactggaactgtaacaatggatgttaaaaaagctgttgaagaaatcaaagctggtaaagtagaatatcgtgctgaaaaagctggtatcgtacatgcatcaattggtaaagtttcatttactgatgaacaattaattgaaaacttcaatactttacaagatgtattagctaaagctaaaccatcatctgctaaaggtacatacttcaaatctgttgctgtaactacaacaatgggtcctggagttaaaattgatactgcaagtttcaaataataaatgatataaacaattacaggctgaaagaaatatctttcagtctgtaaaaatatattgacaataagtaatttccaagttatattacttattgtgattattttacctaagacagtaggagttatttataacttaaaatttatcctgccgaggctaaaattgacttgaacgtgatgatctatgatctttcaagcactttttgccgtgggtagaaagtgctttttttattaattttaaaaaaagcaccaaaaatttaaatggaggtgtctgaatgtctgctatcattgaagctaaaaaacaactagttgatgaaattgctgaggtactatcaaattcagtttcaacagtaatcgttgactaccgtggattaacagtagctgaagttactgacttacgttcacaattacgtgaagctggtgttgagtataaagtatacaaaaacactatggtacgtcgtgcagctgaaaaagctggtatcgaaggcttagatgaattcttaacaggtcctactgctattgcaacttcaagtgaagatgctgtagctgcagcgaaagtaatttctggatttgctaaagatcatgaagcattagaaattaaatcaggcgttatggaaggcaatgttattacagcagaagaagttaaaactgttggttcattaccttcacacgatggtcttgtatctatgcttttatcagtattacaagctcctgtacgcaacttcgcttatgcggttaaagctattggagaacaaaaagaagaaaacgctgaataatttttagcgtaaaaaaattaaaaataatggaggaattataaaatggctaatcatgaacaaatcattgaagcgattaaagaaatgtcagtattagaattaaacgacttagtaaaagcaattgaagaagaatttggtgtaactgcagctgctccagtagcagtagcaggtgcagctggtggcgctgacgctgcagcagaaaaaactgaatttgacgttgagttaacttcagctggttcatctaaaatcaaagttgttaaagctgttaaagaagcaactggtttaggattaaaagatgctaaagaattagtagacggagctcctaaagtaatcaaagaagctttacctaaagaagaagctgaaaaacttaaagaacaattagaagaagttggagctactgtagaattaaaataattcaagtatcttaaacttaataatcaaagttttatagcaagtattgctataatataatgattctttgagaagttaaaaccccgttattttgataacggggttttattcatttaaagactgagtgaaatgttataattataatgacgagttacaaagtgaagatgaggtggaataatgagtcattattacgatgaagatccaagtgtaattagcaatgaacaacgtattcaatatcaattaaaccatcataaaattgatttaataactgataacggagtgttttcgaaagataaagtagattatggttcagatgttcttgttcaaacttttttgaaagcgcatccacctggtccaagtaagcgaattgccgatgttggttgtggttacggaccaattggtttgatgattgctaaagtatcaccacatcattcaattacaatgctagatgttaatcacagagcgctagccttagttgaaaaaaacaaaaaattaaatggtattgataatgtgatcgtaaaggaaagtgatgctttgtctgctgtggaagacaaaagttttgattttattttaaccaatccaccaataagagcagggaaagaaaccgtgcatcgtatattcgagcaagcattacatagattagactcgaacggtgaactattcgttgtaattcagaagaagcaaggtatgccatctgcaaagaaaagaatgaatgaactttttggaaatgtagaagtggtaaataaagataaaggatattacattctgagaagtataaaagcttgaaatgaaatggatattctgttatagttatataatgtaaaaatttatgttcaataagtgtgtacttttacgttaaatagataagttaattaagaataaatatagaatcgaaaatggtgtcatcattagtgttgccgttttctttttgtctttttattaatatgcttatggtatttagctaaaagcggatcacataatttttgaggggtgaatctgtttggcaggtcaagttgtccaatatggaagacatcgtaaacgtagaaactacgcgagaatttcagaagtattagaattaccaaacttaatagaaattcaaactaaatcttacgagtggttcctaagagaaggtttaatcgaaatgtttagagacatttctccaattgaagattttactggtaatttgtcattagagtttgtggattaccgtttaggagaaccaaaatatgatttagaagaatctaaaaaccgtgacgctacttatgctgcacctcttcgtgtaaaagtgcgtctaatcattaaagaaacaggagaagttaaagaacaagaagtctttatgggtgatttcccattaatgactgatacaggtacgttcgttatcaatggtgcagaacgtgtaatcgtatctcaattagttcgttcaccatccgtttatttcaatgaaaaaatcgacaaaaatggtcgtgaaaactatgatgcaacaattattccaaaccgtggtgcatggttagaatatgaaacagatgctaaagatgttgtatacgtacgtattgatagaacacgtaaactaccattaacagtattgttacgtgcattaggtttctcaagcgaccaagaaattgttgaccttttaggtgacaatgaatatttacgtaatactttagagaaagacggcactgaaaacactgaacaagcgttattagaaatctatgaacgtttacgtccaggtgaaccaccaactgttgaaaatgctaaaagtctattgtattcacgtttctttgatccaaaacgctatgacttagcaagcgtgggtcgttataaaacaaacaaaaaattacatttaaaacatcgtttatttaatcaaaaattagctgagccaattgtaaatactgaaactggtgaaattgtagttgaagaaggtacagtgcttgatcgtcgtaaaatcgacgaaatcatggatgtacttgaatcaaatgcaaacagcgaagtgtttgaattgcatggtagcgttatagacgagccagtagaaattcaatcaattaaagtatatgttcctaacgatgatgaaggtcgtacgacaactgtaattggtaatgctttccctgactcagaagttaaatgcattacaccagcagatatcattgcttcaatgagttacttctttaacttattaagcggtattggatatacagatgatattgaccatttaggtaaccgtcgtttacgttctgtaggtgaattactacaaaaccaattccgtatcggtttatcaagaatggaaagagttgtacgtgaaagaatgtcaattcaagatactgagtctatcacacctcaacaattaattaatattcgacctgttattgcatctattaaagaattctttggtagctctcaattatcacaattcatggaccaagcaaacccattagctgagttaacgaataaacgtcgtctatcagcattaggacctggtggtttaacacgtgaacgtgctcaaatggaagtacgtgacgttcactactctcactatggccgtatgtgtccaattgaaacacctgagggaccaaacattggattgattaactcattatcaagttatgcacgtgtaaatgaattcggctttattgaaacaccatatcgtaaagttgatttagatacacatgctatcactgatcaaattgactatttaacagctgacgaagaagatagctatgttgtagcacaagcaaactctaaattagatgaaaatggtcgtttcatggatgatgaagttgtatgtcgtttccgtggtaacaatacagttatggctaaagaaaaaatggattatatggatgtatcgccgaagcaagttgtttcagcagcgacagcatgtattccattcttagaaaatgatgactcaaaccgtgcattgatgggtgcgaacatgcaacgtcaagcagtgcctttgatgaatccagaagcaccatttgttggtacaggtatggaacacgttgcagcacgtgattctggtgcggctattacagctaagcacagaggtcgtgttgaacatgttgaatctaatgaaattcttgttcgtcgtctagttgaagagaacggcgttgagcatgaaggtgaattagatcgctatccattagctaaatttaaacgttcaaactcaggtacatgttacaaccaacgtccaatcgttgcagttggagatgttgttgagtataacgagattttagcagatggaccatctatggaattaggagaaatggcattaggtagaaacgtagtagttggtttcatgacttgggacggttacaactatgaggatgccgttatcatgagtgaaagacttgtgaaagatgacgtgtatacttctattcatattgaagagtatgaatcagaagcacgtgatactaagttaggacctgaagaaatcacaagagatattcctaatgtttctgaaagtgcacttaagaacttagacgatcgtggtatcgtttatattggtgcagaagtaaaagatggagatattttagttggtaaagtaacgcctaaaggtgtaactgagttaactgccgaagaaagattgttacatgcaatctttggtgaaaaagcacgtgaagttagagatacttcattacgtgtacctcacggcgctggcggtatcgttcttgatgtaaaagtattcaatcgtgaagaaggcgacgatacattatcacctggtgtaaaccaattagtacgtgtatatatcgttcaaaaacgtaaaattcatgttggtgataagatgtgtggtcgacatggtaacaaaggtgtcatttctaagattgttcctgaagaagatatgccttacttaccagatggacgtccgatcgatatcatgttaaatcctcttggtgtaccatctcgtatgaacatcggacaagtattagagctacacttaggtatggctgctaaaaatcttggtattcacgttgcatcaccagtatttgacggtgcaaacgatgacgatgtatggtcaacaattgaagaagctggtatggctcgtgatggtaaaactgtactttatgatggacgtacaggtgaaccattcgataaccgtatttcagtaggtgtaatgtacatgttgaaacttgcgcacatggttgatgataaattacatgcgcgttcaacaggaccatattcacttgttacacaacaaccacttggcggtaaagcgcaattcggtggacaacgttttggtgagatggaggtatgggcacttgaagcatatggtgctgcatacacattacaagaaatcttaacttacaaatccgatgatacagtaggacgtgtgaaaacatacgaggctattgttaaaggtgaaaacatctctagaccaagtgttccagaatcattccgagtattgatgaaagaattacaaagtttaggtttagatgtaaaagttatggatgagcaagataatgaaatcgaaatgacagacgttgatgacgatgatgttgtagaacgcaaagtagatttacaacaaaatgatgctcctgaaacacaaaaagaagttactgattaatacgcaatttacaaaacaggcaaaaagatactaagctgaattttattgatgattcagtttagtactttaagccattttaaataaatgcaaatcaatcaaatagcacagctaatctaaattgaaggaggtaggctccttgattgatgtaaataatttccattatatgaaaataggattggcttcacctgaaaaaatccgttcttggtcttttggtgaagttaaaaaacctgaaacaatcaactaccgtacattaaaacctgaaaaagatggtctattctgtgaaagaattttcggacctacaaaagactgggaatgtagttgtggtaaatacaaacgtgttcgctacaaaggcatggtctgtgacagatgtggagttgaagtaactaaatctaaagtacgtcgtgaaagaatgggtcacattgaacttgctgctccagtttctcacatttggtatttcaaaggtataccaagtcgtatgggattattacttgacatgtcaccaagagcattagaagaagttatttactttgcttcttatgttgttgtagatccaggtccaactggtttagaaaagaaaactttattatctgaagctgaattcagagattattatgataaatacccaggtcaattcgttgcaaaaatgggtgcagaaggtattaaagatttacttgaagagattgatcttgacgaagaacttaaattgttacgcgatgagttggaatcagctactggtcaaagacttactcgtgcaattaaacgtttagaagttgttgaatcattccgtaattcaggtaacaaaccttcatggatgattttagatgtacttccaatcatcccaccagaaattcgtccaatggttcaattagatggtggacgatttgcaacaagtgacttaaacgacttataccgtcgtgtaattaatcgaaataatcgtttgaaacgtttattagatttaggtgcacctggtatcatcgttcaaaacgaaaaacgtatgttacaagaagccgttgacgctttaattgataatggtcgtcgtggtcgtccagttactggcccaggtaaccgtccattaaaatctttatctcatatgttaaaaggtaaacaaggtcgtttccgtcaaaacttacttggtaaacgtgttgactattcaggacgttcagttattgcagtaggtccaagcttgaaaatgtaccaatgtggtttaccaaaagaaatggcacttgaactatttaaaccattcgtaatgaaagaattagttcaacgtgaaattgcaactaacattaaaaatgcgaagagtaaaatcgaacgtatggatgatgaagtttgggacgtattggaagaagtaattagagaacatcctgtattacttaaccgtgcaccaacacttcatagacttggtattcaagcatttgaaccaactttagttgaaggtcgtgcgattcgtctacatccacttgtaacaacagcttataacgctgactttgacggtgaccaaatggcggttcacgttcctttatcaaaagaggcacaagctgaagcaagaatgttgatgttagcagcacaaaacatcttgaaccctaaagatggtaaacctgtagttacaccatcacaagatatggtacttggtaactattaccttactttagaaagaaaagatgcagtaaatacaggcgcaatctttaataatacaaatgaagtattaaaagcatatgcaaatggctttgtacatttacacactagaattggtgtacatgcaagttcgttcaataatccaacatttactgaagaacaaaacaaaaagattcttgctacgtcagtaggtaaaattatattcaatgaaatcattccagattcatttgcttatattaatgaacctacgcaagaaaacttagaaagaaagacaccaaacagatatttcatcgatcctacaactttaggtgaaggtggattaaaagaatactttgaaaatgaagaattaattgaacctttcaacaaaaaattcttaggtaatattattgcagaagtattcaacagatttagcatcactgatacatcaatgatgttagaccgtatgaaagacttaggattcaaattctcatctaaagctggtattacagtaggtgttgctgatatcgtagtattacctgataagcaacaaatacttgatgagcatgaaaaattagtcgacagaattacaaaacaattcaaccgtggtttaatcactgaagaagaaagatataatgcagttgttgaaatttggacagatgcaaaagatcaaattcaaggtgaattgatgcaatcacttgataaaactaacccaatcttcatgatgagtgattcaggtgcccgtggtaacgcatctaactttacacagttagcaggtatgcgtggattgatggccgcaccatctggtaagattatcgaattaccaatcacatcttcattccgtgaaggtttaacagtacttgaatacttcatctcaactcacggtgcacgtaaaggtcttgccgatacagcacttaaaacagctgactcaggatatcttactcgtcgtcttgttgacgtggcacaagatgttattgttcgtgaagaagactgtggtactgatagaggtttattagtttctgatattaaagaaggtacagaaatgattgaaccatttatcgaacgtattgaaggtcgttattctaaagaaacaattcgtcatcctgaaactgatgaaataatcattcgtcctgatgaattaattacacctgaaattgctaagaaaattacagatgctggtattgaacaaatgtatattcgctcagcatttacttgtaacgcacgacatggtgtttgtgaaaaatgttacggtaaaaaccttgctactggtgaaaaagttgaagttggtgaagcagttggtacaattgcagcccaatctatcggtgaaccaggtacacagcttacaatgcgtacattccatacaggtggggtagcaggtagcgatatcacacaaggtcttcctcgtattcaagagattttcgaagcacgtaaccctaaaggtcaagcggtaattacggaaatcgaaggtgtcgtagaagatattaaattagcaaaagatagacaacaagaaattgttgttaaaggtgctaatgaaacaagatcataccttgcttcaggtacttcaagaattattgtagaaatcggtcaaccagttcaacgtggtgaagtattaactgaaggttctattgaacctaagaattacttatctgttgctggattaaacgcgactgaaagctacttattaaaagaagtacaaaaagtttaccgtatgcaaggtgtagaaatcgacgataaacacgttgaggttatggttcgacaaatgttacgtaaagttagaattatcgaagcaggtgatacgaagttattaccaggttcattagttgatattcataactttacagatgcaaatagagaagcatttaaacaccgtaagcgtcctgcaacagctaaaccagtattacttggtattactaaagcatcacttgaaacagaaagtttcttatctgcagcatcattccaagaaacaacaagagttcttacagatgcagcaattaaaggtaagcgtgatgacttattaggtcttaaagaaaacgtaattattggtaagttaattccagctggtactggtatgagacgttatagcgacgtaaaatacgaaaaaacagctaaaccagttgcagaagttgaatctcaaactgaagtaacggaataacaagtatataacagaggctaatgctttagcctcttgttatttttatgtaaattatttgatttaatgttgacgaattctcttgttcaatgttaatatattaaaggttgatgcaagcagaactttggaggataaattattgtctaaggaaaaagttgcacgctttaacaaacaacattttgtagttggtcttaaagaaacgcttaaagcgttaaagaaagatcaagttacatctttgattattgctgaagacgttgaagtatatttaatgactcgcgtgttaagccaaatcaatcagaaaaatatacctgcatcttttttcaaaagcaaacatgctttgggtaaacatgtaggtattaacgtcaatgcgacaatagtagcattgattaaatgagaattagtaagtgttttacttactaaattttatttaacctaaaaatgaaccacctggatgtgtggaattaaaaagtgaagagaggaggacatatcacatgccaactattaaccaattagtacgtaaaccaagacaaagcaaaatcaaaaaatcagattctccagctttaaataaaggtttcaacagtaaaaagaaaaaatttactgacttaaactcaccacaaaaacgtggtgtatgtactcgtgtaggtacaatgacacctaaaaaacctaactcagcgttacgtaaatatgcacgtgtgcgtttatcaaacaacatcgaaattaacgcatacatccctggtatcggacataacttacaagaacacagtgttgtacttgtacgtggtggacgtgtaagagacttaccaggtgtgcgttaccatattgtacgtggagcacttgatacttcaggtgttgacggacgtagacaaggtcgttcattatacggaactaagaaacctaaaaactaagaatttagtttttaattaaatcttaaacttaaaatatttaatataaggaagggaggatttacattatgcctcgtaaaggatcagtacctaaaagagacgtattaccagatccaattcataactctaagttagtaactaaattaattaacaaaattatgttagatggtaaacgtggaacagcacaaagaattctttattcagcattcgacctagttgaacaacgcagtggtcgtgatgcattagaagtattcgaagaagcaatcaacaacattatgccagtattagaagttaaagctcgtcgcgtaggtggttctaactatcaagtaccagtagaagttcgtccagagcgtcgtactactttaggtttacgttggttagttaactatgcacgtcttcgtggtgaaaaaacgatggaagatcgtttagctaacgaaattttagatgcagcaaataatacaggtggtgccgttaagaaacgtgaggacactcacaaaatggctgaagcaaacaaagcatttgctcactaccgttggtaagataaaagcttttaccctgagtgtgttctatattaatgaattttcattaagcgttcatgcttagggcatcgccatatctatcgtatttattcagtaatataaactggaaggagaaaaaatacatggctagagaattttcattagaaaaaactcgtaatatcggtatcatggctcacattgatgctggtaaaacgactacgactgaacgtattctttattacactggccgtatccacaaaattggtgaaacacacgaaggtgcttcacaaatggactggatggagcaagaacaagaccgtggtattactatcacatctgctgcaacaacagcagcttgggaaggtcaccgtgtaaacattatcgatacacctggacacgtagacttcactgtagaagttgaacgttcattacgtgtacttgacggagcagttacagtacttgatgcacaatcaggtgttgaacctcaaactgaaacagtttggcgtcaggctacaacttatggtgttccacgtatcgtatttgtaaacaaaatggacaaattaggtgctaacttcgaatactctgtaagtacattacatgatcgtttacaagctaacgctgctccaatccaattaccaattggtgcggaagacgaattcgaagcaatcattgacttagttgaaatgaaatgtttcaaatatacaaatgatttaggtactgaaattgaagaaattgaaattcctgaagaccacttagatagagctgaagaagctcgtgctagcttaatcgaagcagttgcagaaactagcgacgaattaatggaaaaatatcttggtgacgaagaaatttcagtttctgaattaaaagaagctatccgccaagctactactaacgtagaattctacccagtactttgtggtacagctttcaaaaacaaaggtgttcaattaatgcttgacgctgtaattgattacttaccttcaccactagacgttaaaccaattattggtcaccgtgctagcaaccctgaagaagaagtaatcgcgaaagcagacgattcagctgaattcgctgcattagcgttcaaagttatgactgacccttatgttggtaaattaacattcttccgtgtgtattcaggtacaatgacatctggttcatacgttaagaactctactaaaggtaaacgtgaacgtgtaggtcgtttattacaaatgcacgctaactcacgtcaagaaatcgatactgtatactctggagatatcgctgctgcggtaggtcttaaagatacaggtactggtgatactttatgtggtgagaaaaatgacattatcttggaatcaatggaattcccagagccagttattcacttatcagtagagccaaaatctaaagctgaccaagataaaatgactcaagctttagttaaattacaagaagaagacccaacattccatgcacacactgacgaagaaactggacaagttatcatcggtggtatgggtgagcttcacttagacatcttagtagaccgtatgaagaaagaattcaacgttgaatgtaacgtaggtgctccaatggtttcatatcgtgaaacattcaaatcatctgcacaagttcaaggtaaattctctcgtcaatctggtggtcgtggtcaatacggtgatgttcacattgaattcacaccaaacgaaacaggcgcaggtttcgaattcgaaaacgctatcgttggtggtgtagttcctcgtgaatacattccatcagtagaagctggtcttaaagatgctatggaaaatggtgttttagcaggttatcctttaattgatgttaaagctaaattatatgatggttcataccatgatgtcgattcatctgaaatggccttcaaaattgctgcatcattagcacttaaagaagctgctaaaaaatgtgatcctgtaatcttagaaccaatgatgaaagtaactattgaaatgcctgaagagtacatgggtgatatcatgggtgacgtaacatctcgtcgtggacgtgttgatggtatggaacctcgtggtaatgcacaagttgttaatgcttatgtaccactttcagaaatgttcggttatgcaacatcattacgttcaaacactcaaggtcgcggtacttacactatgtacttcgatcactatgctgaagttccaaaatcaatcgctgaagatattatcaagaaaaataaaggtgaataatataacttgttttgactagctagcctaggttaaaatacaaggtgagcttaaatgtaagctatcatctttatagtttgattttttggggtgaatgcattataaaagaattgtaaaattctttttgcatcgctataaataatttctcatgatggtgagaaactatcatgagagataaatttaaatattatttttaattagaataggagagattttataatggcaaaagaaaaattcgatcgttctaaagaacatgccaatatcggtactatcggtcacgttgaccatggtaaaacaacattaacagcagcaatcgctactgtattagcaaaaaatggtgactcagttgcacaatcatatgacatgattgacaacgctccagaagaaaaagaacgtggtatcacaatcaatacttctcacattgagtaccaaactgacaaacgtcactacgctcacgttgactgcccaggacacgctgactacgttaaaaacatgatcactggtgctgctcaaatggacggcggtatcttagtagtatctgctgctgacggtccaatgccacaaactcgtgaacacattcttttatcacgtaacgttggtgtaccagcattagtagtattcttaaacaaagttgacatggttgacgatgaagaattattagaattagtagaaatggaagttcgtgacttattaagcgaatatgacttcccaggtgacgatgtacctgtaatcgctggttcagcattaaaagctttagaaggcgatgctcaatacgaagaaaaaatcttagaattaatggaagctgtagatacttacattccaactccagaacgtgattctgacaaaccattcatgatgccagttgaggacgtattctcaatcactggtcgtggtactgttgctacaggccgtgttgaacgtggtcaaatcaaagttggtgaagaagttgaaatcatcggtttacatgacacatctaaaacaactgttacaggtgttgaaatgttccgtaaattattagactacgctgaagctggtgacaacattggtgcattattacgtggtgttgctcgtgaagacgtacaacgtggtcaagtattagctgctcctggttcaattacaccacatactgaattcaaagcagaagtatacgtattatcaaaagacgaaggtggacgtcacactccattcttctcaaactatcgtccacaattctatttccgtactactgacgtaactggtgttgttcacttaccagaaggtactgaaatggtaatgcctggtgataacgttgaaatgacagtagaattaatcgctccaatcgcgattgaagacggtactcgtttctcaatccgtgaaggtggacgtactgtaggatcaggcgttgttactgaaatcattaaataatttctaatttcttagattttatataaaaagaagatccctcaatcgaggggtctttttttaatgtgtaaattttgtaatggctattcgatttagaagaacaataattgatgaaagactgactaataaaacttataactgataatactgtttaaataaaattgttgagtcttggacattgtaaaatgctcccttcaaagttttcattttttcaatgtctactttgaagggagcatttcattagtttatgtctcagattcatatctttcaattaatttaaatgcttaatttgttttaaatacttgctctaattctatgatttttaaaaatacagctacagcgtattttaatgatttttcatcaatatcaaatttgggattatggtgtggcgctgtaatacctttactttcattaccacaaccagtcagaaagaatgcacctggtcgtactttcaaataatgtgaaaaatcttctccaatcatcattaaatctgattcattaaagcgtacatgtaagtcatttgttgcttctttaataacttgatatgctttctcgttattatggacaggcaaataccctttaatataattcaaatcatagttaatatcatttgctattgctaaaccttgtagaagcttatccattttgtccattacatgattctgtatatctgaatcgaaagttctaactgtacctttacaaaatgcttgatcaggaataacgctatctgtggtgcctgcttgaatcattccaaatgaaagtacagcttgtttaactggatcgatcgtacgtgaaattattttttgtgcacttaaaatgaactctgccatgattactattgggtcaatggtttcatgaggtttggcaccatgaccaccacgacctttaaatgtgacgctaaattcatctggagaggccatgattgcccccgcacgtgaatgaatagttccagtaggataaccactccataaatgtgtaccgtaaattctatctacattttccagacatccagcatctatcatttcttgagaaccacctggcatgatttcttcaccgtactggaatattaatacaacattaccttctaataaatgtttatgttcatctaaaatctctgctacagtaagtaaaattgctgtatgaccatcatgcccacacgcatgcatacatcctggatttttagacttataaggcacatcgtttaattcctcgacaggtaacgcatcaaagtcagctcttaatgcaatggtaggtcctgtgcccaagcctttaaatgtggctttgataccattgcggccgataggagtttcaatatcacaagataactggcttaattggttaacaatataatcatgtgtttgaaattcttcaaaagataactcaggatattggtgtaaataacgtctgagttgaattgttttattttctttattatttgctagttggaaccaatctaacacccttatcactactttctaaaataatgtttatagtataacattttatgaaattatcgtactaaatgattgctttgagatattttatctatgaatgataaggctttcaagttatgtagaattactgtatgataaaggtattaccaaacaatacttaagggggattatatactgtggttcaatcattacatgagtttttagaggaaaatataaattatctaaaagaaaatggtttgtataatgaaatagatacaattgaaggtgcaaacggaccagaaatcaaaatcaatgggaaatcatacattaacttatcttcaaataattatttaggactagcaacaaatgaagatttgaaatcagctgcaaaagcagctattgatacacatggtgtaggtgcaggcgctgttcgtacaatcaatggtacattagatttacacgacgaattagaagaaacactagcaaaatttaaaggaacagaagctgcaatagcttatcaatcaggatttaattgtaatatggctgctatttcagctgtcatgaataaaaatgatgctattttatcagatgagcttaatcatgcatcaattattgatggatgtcgcttatctaaagctaaaattattcgagttaaccattcagacatggatgatttacgtgcgaaagcaaaagaagcagttgaatcaggtcaatacaataaagtgatgtatatcactgatggcgtttttagtatggatggtgatgtggctaaattacctgaaattgtagaaattgcagaagaatttggtttattaacttatgttgacgacgctcatggttcaggtgttatgggtaaaggcgctggtacggttaaacattttggtttacaagataaaatcgatttccaaataggtacgctttctaaagcaattggtgtcgttggcggttatgtagcaggtacaaaagagttaatagattggttaaaagcacaatcacgaccattcttattctctacatcattagcacctggggataccaaagcaataactgaagcagttaaaaagttaatggattcaactgaattacatgataaattatggaacaatgcacaatatttaaaaaatggattgtcaaaattaggatatgatacaggtgagtcagaaactccaattacaccagtaattattggtgatgaaaaaacaactcaagaatttagtaagcgtttaaaagacgaaggtgtctatgtgaaatctatcgttttcccaacagtaccaagaggtacaggacgtgtaagaaatatgcctacagctgcacatacaaaagacatgttagatgaagcaattgcggcttatgaaaaagtaggaaaagaaatgaagttgatttaatatttatttattcccacggcaaatattgtcgtgggctttttttaatgtttagtttattaacagtaagttcgtatatcaatgtttagtgctccccaaaattgaagtttgaattttaaaagcatcttgtagaatttagttgtatttttttcaaagaaattcattttgattatttttgataatgagcattttaatagtaatacatgtttatagtgtgtagtatatgtctatactagtagtaactatatagagaaagtaggaataaactatgtcacaagatgtaaatgaattaagtaagcaaccaacgccagataaagcagaagataacgcatttttcccatcaccatattcccttagtcaatatacagcacctaaaacagattttgatggtgttgaacacaaaggtgcctataaagatggtaaatggaaagtattgatgattgctgctgaagagcgatatgtattattggaaaatggaaaaatgttctctacgggtaatcatcctgttgaaatgttattacctttacatcatttaatggaagcaggttttgacgttgatgttgcgacattatctggttatccagttaaattagaattatgggctatgccaactgaagacgaggcagttataagtacttataataaattgaaagaaaaattaaaacagccaaaaaaattagcagatgtgattaaaaatgaattaggacctgattcagactatttatctgtctttatcccaggcggacatgctgcagttgttggtatttctgaaagtgaggacgttcaacaaacattagattgggcattagacaatgaccgctttatagttacattatgtcatggaccagcagcactactttcagcagggcttaacagagaaaaatctccattagaaggatactctgtttgtgtcttccctgactcattagatgaaggtgcaaatattgaaataggttatttacctggacgcttgaaatggttagttgctgatttattaactaaacaaggattaaaagtagttaacgacgatatgacaggaagaacgttaaaagatcgtaaattattaacaggtgacagtcctttagcttcaaatgagttaggaaaattagcagttaatgaaatgttaaatgcaatacaaaataaataattaaatattaattagaggagcctcatatgtaaatgtatgagggctcttttttttggcaaaatttaagtgatacttgtaaaatagaacctattatgagtatgatttaagaaaacgcttgcaaaactaataaccgcaactagcgatatggaggaaacatgatgtcttatagcattggaattgattatggaactgcttcaggccgtgtgtttttaattaatacaactaacggtcaagtagtatcaaaatttgtgaaaccatatacacatggtgtcattgagagtgaattaaatggtttgaaaataccacatacatatgcacttcaaaatagtaatgattatttagaaattatggaagaaggaatatcatatatagtacgtgaatcaaaaatagatccagacaatatagtaggtattggtatagactttacttcatctactattatttttactgacgaaaaccttaacccggtacataacttaaaacaatttaaaaacaatccacatgcgtatgtgaaactttggaaacatcatggtgcatataaagaggcagagaaattatatcaaactgctattgaaaataataataagtggttaggccattatggatataatgttagtagtgaatggatgattcccaaaataatggaggtcatgaatcgagcaccagaaattatggaaaaaacggcttatattatggaagcgggcgattggattgtaaataaattaactaataaaaatgtacgctcgaattgtggattaggtttcaaagcattttgggaagaagaaacagggtttcattatgatttatttgataaaatagaccccaaattatcaaaagtaattcaagataaagtatctgcaccggttgttaatattggtgaagcagtagggaaactggatgataaaatggcacagaaattaggattatcaaaagaaactatggtaagtccttttattattgatgcccatgctagtttattaggtattgggtctgaaaaagataaagaaatgactatggtgatgggaacaagcacatgccatcttatgttaaatgaaaagcaacatcaagtgccaggtatatcaggttctgtaaaaggagcaattattccagaattatttgcttatgaagcggggcaatcagcagtaggtgatttgtttgagtatgtcgctaagcaagcaccaaagtcatatgtagatgaagcagaaaatagaaatatgactgtatttgaattaatgaatgaaaagataaaacatcaaatgccaggtgaaagtgggctcattgctcttgattggcataatggaaatcgaagtgtattaagtgatagcaatttaacaggttgtatctttggattaactttacaaactaagcatgaggatatttatagagcatatttagaagctacagcatttggtactaagatgattatgcaacagtatcaagattggcatatggaagtagaaaaggtatttgcatgtggcggtatacctaaaaagaatgctgttatgatggatatctatgcgaatgtactgaataaaaaactaattgttatggatagtgagtatgcaccagcaataggcgcagcaatattaggtgcagtcagtggtggcgcacataattcaattaatgacgcagttgatgctatgaaagagccaattttatacgaaattaatccagaagcggaaaaagtacaaaggtatgaaacattatttaaagcttataaggctttacatgatatccatggttataaaaaagctaatataatgaaagatatccagagtttaagagttgagggataaaaaatttaatttgacagtaattagcaataataaacgctataaattactaaaatcaattaatacaactagaatttccatttacagaaatatcagcaacatgtacatgtcatatatacaagaaagcgcttttatattataattattatgaaaatgaatattatgtccgcttgtgatggactatagctatatagaagagacaaaggagatatttctatgaaaaaaattatgattactggtgcattaggacaaattggtacagaattagttgttaagtgcagagaaatttatgggacagataatgttcttgctacagatattagggaacctgaagcagactcacctgtacaaaatggaccatttgaaatcttagacgtaacagatcgtgaccgtatgtttgagttagttagggactttgaagcggatagtctaatgcatatggcagcattattatcagcaactgctgagaaaaatccaattctagcttgggatttaaatatgggtggattaatgaatgcattagaagctgcaagaacttataatttgcactttttcacaccaagttcaattggtgcatttggagactcaactcctaaagttaatacgccacaagtaacgattcagcaacctacgacaatgtatggtgtaaataaagtagctggagaattattgtgtcaatactatttcaaacgttttggtgtagatacaagaagtgttagattcccaggtttaatctcgcatgttaaagagccaggtggcggtactacagactatgctgttgaaatatacttcaaagcagtaagagagggtcattatacaagcttcatagataaaggcacgtatatggatatgatgtatatggatgatgcaattgaagcaattattaaacttatggaagcagacgacgctaaattagaaactagaaatggttataatttgagcgcaatgagttttgatccagagatggtaaaagaagcaattcaagaatactatcccaattttacattagattacgatgttgatcctattagacaaggtatcgctaatagttggccggattctattgatacaagctgttcacgtggcgaatggggatttgatcctaaatatgatttagcgagcatgactaaattaatgttagaagctattgaacaaaaagatactgttaaaaataataactaatcatttccattcactttaatacacggaatgatattttaaattactctttattttaataaactagtgcatgaattctaatattattcattatacttattgaattcgcgagcttagttcattttaaagtaaagagttttttgtatgtaaagtatattagtaaaacacagattacttgtctctgtgaaattaatacgtttatactaaaagatatagtctttctagaaatctgttaattaattttgaatttttagaaaatttgttgaacagcaaaatatggattgttataatttaagttaaacaaattcttatacaatattattaggaggcaatcaccatgtcacaagcagttaaagttgaacgacgagaaacattaaaacaaaaaccaaatacatctcaactaggttttggtaaatattttactgattatatgttgagttatgattatgatgcagataaaggatggcatgatttgaagatagtaccttatggtcctattgaaatttcacctgctgcacaaggtgttcattatggtcaatcggtattcgaaggattaaaagcatataaaagagatggggaagttgcacttttccgtcctgaagaaaattttaagcgtcttaataactcgttagcacgattagaaatgcctcaagtagacgaagcagaattgttagaggggctaaaacaattagttgatattgaaagagattggattcctgaaggggaaggtcaatcattatatattcgtccatttgtttttgcaacagaaggggcacttggcgttggtgcatcacatcagtataaattattaattattttatctccttcaggtgcatattatggtggtgaaactttaaaaccaactaaaatctatgtagaagatgaatatgtgcgtgctgttcgtggcggtgtaggctttgcaaaagttgcaggtaactatgcggcaagtttattagcacaaactaatgcaaataaattaggttatgaccaagtattatggcttgatggtgttgaacagaaatatatcgaagaagttggtagcatgaacattttcttcgttgaaaatggcaaagtaattacaccagagttgaatggcagtattttacctggtattacacgtaaatctattatcgaattagctaaaaacttaggatatgaagtcgaagagcgccgcgtttcaatcgatgaattattcgaatcatatgataaaggtgagttaacagaagtatttggtagtggtactgcagcagttatttcacctgtgggtacattgagatacgaagatcgtgaaatcgttattaataataatgagactggtgaaattactcaaaaattatacgacgtctatactggtattcaaaatggtactttagaagataaaaatggttggagagtcgttgtaccaaaatattaataaaaattgaatataatcatgaaaacaatatgcaaaagttaatcatgactaaaatccctttcaatgaagcgaagcatggtaataaattaagtttacaatgtttattgttaagtattgaaggggatttcacttattattatatttaattcaatatttaaatagaacaatactacgagttcattttcaggggataacgaatatcatagaatcagcataatacgaaataaataaataggagtattgatatcaatggaatggatattatttgataaagatggtacgttaattgaatttgatagaagttgggaaaaaataggggtacgatttgtacaatcattgcttgagactttcccagtacataataaagaagctgctttaagacaactcggtgtcattaaagaatctattgatccaaaatcagtgatgggttcaggatctttacaacaaattatccaggcatttaatgatgtgacgggacaagatacaaccgactggtccaagtcaacaagtcaaaagctggtagatgaacgtattcctgaaattaattgggtagaaggtgttaaagaagcacttatcgatttgaaagcaaaaggctatcaacttggtattgttacgagtgatactaaaaaaggtgtagaacaatttttagcacataccaatgctacctcgttgttcgatttgatcatttctaccgaagcggatgcctatgagaagccaaatcctaaagtattatcgcctttatttgagcaatataatgtagatcctcagaaagtagctatagtaggagacactgctaatgatatgaagacagcaagtaatgcaaatttaggtatggcaataggtgtattaacaggtattgcaacaaaagaagaattacatgaagctgatattattttaaatagtgcggcagatattttagaagctttaaattaaaaagaaagacatagtgtatatgtgaattaatgtattcgatagaattgataaaataatcgataatatctatggaatatacattgaatataaacatatacgctatgtctttagtcttttatcgtgtatctacttgtcgatatgtttgaataattcgagcaattttgtttatcataggatttaaagattcggggtccttatggatatcatattcattaatattgatacgtacaactggacatgcattaaagctattaatccaatcgtcatagcgtttaaatagctttttccagtattcagggtctgtattaatttccatttcgcgaccacgttcaataatacgatcaatgacctcatcatagttacattctaaataaatcattacatcaggtttaggaaaataaggtgtcatgaccatggcattaaataagtctgaatatgttttgaaatcttctttactcattgtgccttcttcttcatgcatttttgcaaaaatatcaacatcttcataaattgatcgatcttggacaaagccaccaccatattcaaacatacgcttttgttctttaaaacgttcagctaagaagtaaatttgcaaatggaaactccatcgttcaaaatcgctgtaaaatttatctaaatatggattatgttcgacattttcaaaagacgttttaaagtttaatttatctgcaagtgcttgcgttagtgttgattttccaacaccaactgtacctgcaatggttataatggcattttgtggaataccgtaattattcattggtaatatctcctatcataggtaatataatatgtaatatatcttcgtaatcttgttcatttttaagaaaatcaatagaagttgtatcgattaaaactacatttgaaccattactttgtaaggactcataatactcacgataatctttttttaactttaacagatattcatcttctatttgatgctcaaaactacggttacgtttagcaattctagattttaacacatcaaggtctgcatctaaaaagataatcatattcggcataatcatatcttcagttaaaatatcataaattttactgaatttctgaaattcaacagaactcaaagtatttttagcaaatatcttatttttatgtatatgataatcactaactacaccttgatttagttgtgttacatcttgaaattgcttatatctattgcataaaaagaacatttcagtttgaaaactccatttagagatatcttcataaaagtctgataaaaatggattttctgtgatgatttctttttcttcataaaaatctaaagtttgacttaatttgtgtgcaagtgaagatttacctacgccaataggaccttcaattgctataaaaggtttgttcatattcacatctccaaatgttaaaatagacattgagtattgtaccataagtgaggtatctggacataaatgacaaatgatatatattttatgacattagcgattgaagaagctaaaaaagcagctcaactaggcgaagtacctataggtgctatcatcactaaagatgatgaagttatcgctagagcacataatttaagagaaacactacaacaaccaacggcgcatgctgaacatattgcaattgaacgtgcagccaaagtgttaggtagttggcgtttagaaggttgcacattatatgtaaccttagaaccatgtgtcatgtgcgcaggaacaattgtaatgagtcgcattccaagagtcgtctatggcgcagatgatcctaaaggtggttgtagtggcagtttaatgaatttattgcaacaatctaattttaatcatcgtgcaattgttgataaaggtgtacttaaagaagcatgtagcacattattaacaacattttttaaaaacttaagagccaataagaaatccaccaattagacgatagtacatactaattaaaatttgttagaattacattatatgataaattaatgacaatataaatgttaatagaaaagtatgtgcgctgagtatatattcttatttaagaacaagattttaaatttacgaaacgaggtaacataatgataaaactaatagccactgatatggatggcacgctacttaatgcagcacatgaaatttctcaacctaatattgatgcgattaaatacgctcaagaacaagggataacggttgttatcgcgacaggtcgagcattttatgaagcacaagcaccagttgctgacacagatttaacagtaccatatatttgtttgaatggtgctgaagtacgtgatgaaactttcaatgtaatgagcacttcacaccttaataaatcgttagtacacaaaattacaaatgttttaaaagatgcaggtatttattatcaagtatacacgagtcgtgcgatttatactgaagatccacaaagagatttagacatttacatagatattgctgagcgtgcaggtcaacatgcaaacgttgagcgtattaaaaatggtattcaaagacgcatagataatggtacgttgaaagttgttgataattatgatgctattgaaaacatacctggtgaattaattatgaaaatattagcatttgatggaaatttagaaaaaattgacaaagctagtaaaattttagctgaatctccgaatttagctatatcatcatcttcgagaggaaatatagaaataacgcattcagatgcacaaaaaggtattgcgctagaaacaattgccgaaagattagggattgaaatgaaagaagtcatgtcaataggtgacaatttaaatgacttatcaatgttagagaaagttggctatccagttgcgatggaaaatggtgcagaagaagttaaaaaaatagcgaaatatgtcacagatacgaatgaaaatagtggtgttggaaaagctattatgaaattattacgtgaacaacaagtttaataaaaaaagaggggtcaaatatgaaaggattaattattattggcagtgcacaagtgaattcacatacaagtgcactagcaagatacttaactgagcattttaaaacacatgatattgaagcggaaatattcgatttagcagaaaaaccgttaaatcaattagatttttcaggaacaacaccgtctattgatgaaatcaaacaaaatatgaaagatttaaaagagaaagcaatggcggcggactttttaatattaggaacgccaaactatcatggttcatattctggaatattgaaaaatgcattagatcatctaaatatggattattttaaaatgaaacctgtaggcttaataggaaatagtggtggtattgttagttcagagccattgtcacatttaagagtaatcgtcagaagtttactaggcattgctgtaccaactcaaatagcaacacatgattctgattttgctaaaaatgaagatggttcatattacttaaatgatagtgaattccaattacgagcaagattatttgtcgatcaaattgtatcttttgtgaataatagtccatatgaacatttaaaataatattaaaaaatatgtaaatatacattaaaaataggtatgtagcttaaggtatttcattgagaatgcttttaagtcacatgcctattttttgttctaatgcaccaatagtaagcctttgatattactgttgtgagcaatgttattaattaaaataagatgtaatagcgaattgaaaacaagcttagattaaaagtgagttttaaaaatatagataaataatttaaagcaattaaagaaaaaaagtattaaaaattgcaattcataaactgtgattcatattaatatttctagcaaataacattgtaaaataaagaaaaataattaaagtattgcactttattgaaatttatattacgatagtaatgcagaaatttatatatgcaaaatattatatttatcaaattttgatattttaaaggagtattattaaatgaataataaaaagacagcaacaaatagaaaaggcatgataccaaatcgattaaacaaattttcgataagaaagtattctgtaggtactgcttcaattttagtagggacaacattgatttttgggttaagtggtcatgaagctaaagcggcagaacatacgaatggagaattaaatcaatcaaaaaatgaaacgacagccccaagtgagaataaaacaactaaaaaagttgatagtcgtcaactaaaagacaatacgcaaactgcaactgcagatcagcctaaagtgacaatgagtgatagtgcaacagttaaagaaactagtagtaacatgcaatcaccacaaaacgctacagctaatcaatctactacaaaaactagcaatgtaacaacaaatgataaatcatcaactacatatagtaatgaaactgataaaagtaatttaacacaagcaaaagatgtttcaactacacctaaaacaacgactattaaaccaagaactttaaatcgcatggcagtgaatactgttgcagctccacaacaaggaacaaatgttaatgataaagtacatttttcaaatattgacattgcgattgataaaggacatgttaatcagactactggtaaaactgaattttgggcaacttcaagtgatgttttaaaattaaaagcaaattacacaatcgatgattctgttaaagagggcgatacatttacttttaaatatggtcaatatttccgtccaggatcagtaagattaccttcacaaactcaaaatttatataatgcccaaggtaatattattgcaaaaggtatttatgatagtacaacaaacacaacaacatatacttttacgaactatgtagatcaatatacaaatgttagaggtagctttgaacaagttgcatttgcgaaacgtaaaaatgcaacaactgataaaacagcttataaaatggaagtaactttaggtaatgatacatatagcgaagaaatcattgtcgattatggtaataaaaaagcacaacctcttatttcaagtacaaactatattaacaatgaagatttatcgcgtaatatgactgcatatgtaaatcaacctaaaaatacatatactaaacaaacgtttgttactaatttaactggatataaatttaatccaaatgcaaaaaacttcaaaatttacgaagtgacagatcaaaatcaatttgtggatagtttcacccctgatacttcaaaacttaaagatgttactgatcaattcgatgttatttatagtaatgataataaaacagctacagtcgatttaatgaaaggccaaacaagcagcaataaacaatacatcattcaacaagttgcttatccagataatagttcaacagataatggaaaaattgattatactttagacactgacaaaactaaatatagttggtcaaatagttattcaaatgtgaatggctcatcaactgctaatggcgaccaaaagaaatataatctaggtgactatgtatgggaagatacaaataaagatggtaaacaagatgccaatgaaaaagggattaaaggtgtttatgtcattcttaaagatagtaacggtaaagaattagatcgtacgacaacagatgaaaatggtaaatatcagttcactggtttaagcaatggaacttatagtgtagagttttcaacaccagccggttatacaccgacaactgcaaatgtaggtacagatgatgctgtagattctgatggactaactacaacaggtgtcattaaagacgctgacaacatgacattagatagtggattctacaaaacaccaaaatatagtttaggtgattatgtttggtacgacagtaataaagatggtaaacaagattcgactgaaaaaggaattaaaggtgttaaagttactttgcaaaacgaaaaaggcgaagtaattggtacaactgaaacagatgaaaatggtaaataccgctttgataatttagatagtggtaaatacaaagttatctttgaaaaacctgctggcttaactcaaacaggtacaaatacaactgaagatgataaagatgccgatggtggcgaagttgatgtaacaattacggatcatgatgatttcacacttgataatggctactacgaagaagaaacatcagatagcgactcagattcagatagcgactcagattcagacagcgattcagacagcgactcagactcagatagcgattcagattcagacagcgactcagactcagacagcgattcagactcggatagcgactcagactcagatagcgactcagattcggatagcgactcagactcagatagcgattcagattcagatagcgattcggactcagacagtgattcagattcagactcagatagcgactcagattctgacagcgattcagactcagacagcgactcagactcagacagtgattcagattcagacagcgactcagactcagatagcgactcagactcagatagcgactcagactcggatagcgattcagattcagacagcgattcggactcagacaacgactcagattcagatagcgattcagattcagatgcaggtaaacatactccggctaaaccaatgagtacggttaaagatcagcataaaacagctaaagcattaccagaaacaggtagtgaaaataataattcaaataatggcacattattcggtggattattcgcggcattaggatcattattgttattcggtcgtcgtaaaaaacaaaataaataatatgattaacttaaccaggtccatgtggcctggttttttctgtttagaaattcccagatataaaacaaaaaatctttaaggaatagatacaatttaatttgttacagaaatgtaattgtctatgaattagaaaagctaagatattaatttcaagggcaaataatactattttttatgatgattaaataaagattacaaaactcataaaaacttttatttaaacacaaatgttaaataacgttttacgataaagaaaaataattaaagtattgtgctttatctaaaaatgtaatactatattgatatacatttttgtatttaaaacaattgtattatttaaaaatttgatgaattaggagtaatctaatgctaaacagagaaaataaaacggcaataacaaggaaaggcatggtatccaatcgattaaataaattttcgattagaaagtacacagtgggaacagcatcaattttagtaggtacaacattaatttttggtctggggaaccaagaagcaaaggctgcagaaagtactaataaagaattgaacgaagcgacaacttcagcaagtgataatcaatcgagtgataaagttgatatgcagcaactaaatcaagaagacaatactaaaaatgataatcaaaaagaaatggtatcatctcaaggtaatgaaacgacttcaaatgggaataaattaatagaaaaagaaagtgtacaatctaccactggaaataaagttgaagtttcaactgccaaatcagatgagcaagcttcaccaaaatctacgaatgaagatttaaacactaaacaaactataagtaatcaagaagcgttacaacctgatttgcaagagaataaatcagtggtaaatgttcaaccaactaatgaggaaaacaaaaaggtagatgccaaaactgaatcaactacattaaatgttaaaagtgatgctatcaagagtaatgatgaaactcttgttgataacaatagtaattcaaataatgaaaataatgcagatatcattttgccaaaaagtacagcacctaaacgtttgaatacaagaatgcgtatagcagcagtacagccatcatcaacagaggctaaaaatgttaatgatttaatcacatcaaatacaacattaactgtcgttgatgcagataaaaacaataaaatcgtaccagcccaagattatttatcattaaaatcacaaattacagttgatgacaaagttaaatcaggtgattatttcacaattaaatactcagatacagtacaagtatatggattgaatccggaagatattaaaaatattggtgatattaaagatccaaataatggtgaaacaattgcgactgcaaaacatgatactgcaaataatttaattacatatacatttacagattatgttgatcgatttaattctgtacaaatgggaattaattattcaatttatatggatgctgatacaattcctgttagtaaaaacgatgttgagtttaatgttacgataggtaatactacaacaaaaacaactgctaacattcaatatccagattatgttgtaaatgagaaaaattcaattggatcagcgttcactgaaacagtttcacatgttggaaataaagaaaatccagggtactataaacaaacgatttatgtaaatccatcggaaaattctttaacaaatgccaaactaaaagttcaagcttaccactcaagttatcctaataatatcgggcaaataaataaagatgtaacagatataaaaatatatcaagttcctaaaggttatacattaaataaaggatacgatgtgaatactaaagagcttacagatgtaacaaatcaatacttgcagaaaattacatatggcgacaacaatagcgctgttattgattttggaaatgcagattctgcttatgttgtaatggttaatacaaaattccaatatacaaatagcgaaagcccaacacttgttcaaatggctactttatcttcaacaggtaataaatccgtttctactggcaatgctttaggatttactaataaccaaagtggcggagctggtcaagaagtatataaaattggtaactacgtatgggaagatactaataaaaacggtgttcaagaattaggagaaaaaggcgttggcaatgtaactgtaactgtatttgataataatacaaatacaaaagtaggagaagcagttactaaagaagatgggtcatacttgattccaaacttacctaatggagattaccgtgtagaattttcaaacttaccaaaaggttatgaagtaaccccttcaaaacaaggtaataacgaagaattagattcaaacggcttatcttcagttattacagttaatggcaaagataacttatctgcagacttaggtatttacaaacctaaatacaacttaggtgactatgtctgggaagatacaaataaaaatggtatccaagaccaagatgaaaaaggtatatctggcgtaacggtaacattaaaagatgaaaacggtaacgtgttaaaaacagttacaacagacgctgatggcaaatataaatttactgatttagataatggtaattataaagttgaatttactacaccagaaggctatacaccgactacagtaacatctggtagcgacattgaaaaagactctaatggtttaacaacaacaggtgttattaatggtgctgataacatgacattagatagtggattctacaaaacaccaaaatataatttaggtaattatgtatgggaagatacaaataaagatggtaagcaggattcaactgaaaaaggtatttcaggcgtaacagttacattgaaaaatgaaaacggtgaagttttacaaacaactaaaacagataaagatggtaaatatcaatttactggattagaaaatggaacttataaagttgaattcgaaacaccatcaggttacacaccaacacaagtaggttcaggaactgatgaaggtatagattcaaatggtacatcaacaacaggtgtcattaaagataaagataacgatactattgactctggtttctacaaaccgacttacaacttaggtgactatgtatgggaagatacaaataaaaacggtgttcaagataaagatgaaaagggcatttcaggtgtaacagttacgttaaaagatgaaaacgacaaagttttaaaaacagttacaacagatgaaaatggtaaatatcaattcactgatttaaacaatggaacttataaagttgaattcgagacaccatcaggttatacaccaacttcagtaacttctggaaatgatactgaaaaagattctaatggtttaacaacaacaggtgtcattaaagatgcagataacatgacattagacagtggtttctataaaacaccaaaatatagtttaggtgattatgtttggtacgacagtaataaagacggcaaacaagattcaactgaaaaaggtatcaaagatgttaaagttactttattaaatgaaaaaggcgaagtaattggaacaactaaaacagatgaaaatggtaaatactgctttgataatttagatagcggtaaatacaaagttatttttgaaaagcctgctggcttaacacaaacaggtacaaatacaactgaagatgataaagatgcagatggtggcgaagttgacgtaacaattacggatcatgatgatttcacacttgataatggctactacgaagaagaaacatcagatagcgactcagattcggacagcgactcagattcagacagagactcagactcagatagtgattcagactcggatagcgattcagattcagacagcgattcagattcagatagcgattcagattcagacagagactcagatagtgattcagactcagatagcgactcagattcagacagcgactcagattcagacagcgactcagactcagatagtgattcagactcagatagcgactcagattcagacagcgactcagactcagacagcgactcagactcagacagtgactcagattcagatagcgactcagattcggacagcgattcagactcagatagcgactcagattcagatagcgattcggactcagatagcgactcagattcagatagtgattcagactcagatagcgactcagattcagacagcgactcagattcggatagcgactcagattcagacagcgactcagactcggatagtgattcagactcagatagcgactcagactcagatagcgattcagattcagatagcgactcagactcagacagcgattcagactcagacagcgactcagactcagatgcaggtaagcacacacctgttaaaccaatgagtactactaaagaccatcacaataaagcaaaagcattaccagaaacaggtaatgaaaatagcggctcaaataacgcaacgttatttggcggattattcgcagcattaggatcattattgttattcggtcgtcgtaaaaaacaaaataaataatacagcttataccaggtccgtgaggcctggttttttatttcaaaatttatgaaatgtatcttatgtttgagattaaatagtgcaattttttaaaaaatataacataaatcaacataaatttaattcatctttacattaaaagtacaaacgaataagaaaagcaattaaacacagtatcaaaccatttaaaacaattgatataaaaaacaaacgaataattaaaaagtactagaattaatttattcaaaccaaagtgtaaaataacagtcttagataaataaatttatttaaagtattgtgctttatctaaaaatgtattacgatgggaatacaaatttttatatgtaaaaatattaattttttgcaaatattgatattttaaaggagatttatatgattaacagggataataaaaaggcaataacaaaaaagggtatgatttcaaatcgcttaaacaaattttcgattagaaagtatactgtaggaactgcatcgattttagtaggtacgacattgatttttggtctagggaaccaagaagctaaagctgctgaaaacactagtacagaaaatgcaaaacaagatgatgcaacgactagtgataataaagaagtagtgtcggaaactgaaaataattcgacaacagaaaataattcaacaaatccaattaagaaagaaacaaatactgattcacaaccagaagctaaaaaagaatcaacttcatcaagtactcaaaaacagcaaaataacgttacagctacaactgaaactaagcctcaaaacattgaaaaagaaaatgttaaaccttcaactgataaaactgcgacagaagatacatctgttattttagaagagaagaaagcaccaaataatacaaataacgatgtaactacaaaaccatctacaagtgaaattcaaacaaaaccaactacacctcaagaatctacaaatattgaaaattcacaaccgcaaccaacgccttcaaaagtagacaatcaagttacagatgcaactaatccaaaagaaccagtaaatgtgtcaaaagaagaacttaaaaataatcctgagaaattaaaagaattggttagaaatgatagcaatacagatcattcaactaaaccagttgctacagctccaacaagtgttgcaccaaaacgtgtaaacgcaaaaatgcgctttgcagttgcacaaccagcagcagttgcttcaaacaatgtaaatgatttaattaaagtgacgaagcaaacaatcaaagttggcgatggtaaagataatgtggcagcagcgcatgacggtaaagatattgaatatgatacagagtttacaattgacaataaagtcaaaaaaggcgatacaatgacgattaattatgataagaatgtaattccttcggatttaacagataaaaatgatcctatcgatattactgatccatcaggagaggtcattgctaaaggaacatttgataaagcaactaagcaaatcacatatacatttacagactatgtagataaatatgaagatataaaatcacgcttaactctatattcgtatattgataaaaaaacagttccaaatgagacaagtttgaatttaacatttgctacagcaggtaaagaaacaagccaaaatgtcactgttgattatcaagatccaatggtccatggtgattcaaacattcaatctatctttacaaaattagatgaagataagcaaactattgaacaacaaatttatgttaaccctttgaaaaaatcagcaaccaacactaaagttgatatagctggtagtcaagtagatgattatggaaatattaaactaggaaatggtagcaccattattgaccaaaatacagaaataaaggtttataaagttaactctgatcaacaattgcctcaaagtaatagaatctatgattttagtcaatacgaagatgtaacaagtcaatttgataataaaaaatcatttagtaataatgtagcaacattggattttggtgatattaattcagcctatattatcaaagttgttagtaaatatacacctacatcagatggcgaactagatattgcccaaggtactagtatgagaacaactgataaatatggttattataattatgcaggatattcaaacttcatcgtaacttctaatgacactggcggtggcgacggtactgttaaacctgaagaaaagttatacaaaattggtgactatgtatgggaagacgttgataaagacggtgttcaaggtacagattcaaaagaaaaaccaatggcaaacgttttagttacattaacttacccggacggtactacaaaatcagtaagaacagatgctaatggtcattatgaattcggtggtttgaaagacggagaaacttatacagttaaattcgaaacgccaactggatatcttccaacaaaagtaaatggaacaactgatggtgaaaaagactcaaatggtagttcggttactgttaaaattaatggtaaagatgatatgtctttagatactggtttttacaaagaacctaaatacaacttaggtgactatgtatgggaagatactaataaagatggtatccaagatgcaaatgagccaggaatcaaagatgttaaggttacattaaaagatagtactggaaaagttattggtacaactactactgatgcctcgggtaaatataaatttacagatttagataatggtaactatacagtagaatttgaaacaccagcaggttacacgccaacggttaaaaatactacagctgatgataaagattctaatggtttaacaacaacaggtgtcattaaagatgcagataatatgacattagacagtggtttctataaaacaccaaaatacagtttaggtgattatgtttggtacgacagtaataaagacggcaaacaagattcaactgaaaaaggtatcaaagatgtgacagttacattgcaaaacgaaaaaggcgaagtaattggaacaactaaaacagatgaaaatggtaaatatcgtttcgataatttagatagcggtaaatacaaagttatttttgaaaagcctgctggcttaacacaaacagttacaaatacaactgaagatgataaagatgcagatggtggcgaagttgacgtaacaattacggatcatgatgatttcacacttgataacggatacttcgaagaagatacatcagacagcgattcagactcagatagtgactcagacagcgactcagactcagacagcgactcagactcagacagtgattcagattcagacagcgactcagattcagatagcgactcagattcggacagcgattcagactcagatagcgactcagattcagatagcgattcagactcagacagcgactcagattcagatagcgattcggactcagacagcgattcagactcagatagcgactcagactcagacagcgactcagattcagatagcgattcggactcagatagcgactcagattcagacagcgattcagactcagatagcgactcagattcagacagcgattcagactcagatagcgactcagactcagacagtgattcagattcagacagcgactcagactcagatagcgactcagattcggacagcgactcagactctgatagcgactcagactcagacagtgattcagacagcgattcagactcggatgcaggaaaacatacacctgttaaaccaatgagtactactaaagaccatcacaataaagcaaaagcattaccagaaacaggtagtgaaaataacggctcaaataacgcaacgttatttggtggattatttgcagcattaggttcattattgttattcggtcgtcgcaaaaaacaaaacaaataatacaatatgacccaggtccttgtggcctggtttttttataattacacatgcaatagatgtatttttcatataaaataaacaataaagatacggaataaaacttatatgaggcgataatatgaattacattttaggaacaattttagaaagtaaaattacaggtgtagaaaaagcgcaaataaatagattgaagttgttcaaacaacacggcatatcttcaaaatgtgtatatgttaaatggaatccttattcatacacatatgcgaagcaacatcagattgaaaatgatgtatttacaatgtatgactattttcaaaaagcaatcaattataaaaagacaaagcaagttaactggatacagtattgggaaaagtcatgtaggtacacattgaaatttgtggaaaattcaaatgatgtcagaatatatgatgaagagcaatttgtaatgtatgctcattttttagataaacagtatcatcaattaaattatgtgaattattttgatcataaaagaagaaaagtaaaacgcgaattgtatgatggaagaggctttttaagttgttctcgaattttaggtgaaggacaacggattgtactcgaaaattactatacacctaatggggaaatcgtcatccaaaaatattttgacgatataaaagggaaaaacacgctcacaaaggttatcttaaatgaagaccagcatcaacaattttttgatacagaagatgaattagttcaatattttctccatcaattatgtaaaaataatgatcaaatcatattagatcgtcctcatgaattaggaaatgttatagcgggattaaatcaaagtattccagttattgttgtactccatagtacacatttatccggtgccggtaatggtataaaaagtttttataaaacagtgtttaataatttaacacgttataaagcgattgttgtatcaacagaaaagcaatgccaagatatttcacaatatattgaaaataaaataccagttatcaatattccggttggctacgtggcaaatttaaagtatcaatttgacatcaatcaaaaggagaaaaatcatatcatatcaattgctcgcctcgttgaaaataaacaaattaaacatcaaattgaagtaatcaagcaattagtaacaaaacatcccaatattcaattgaatatttatggacatggaaatggtttgtcagaatatcgacaacttgtagaagattatcatttatcggaacatgttaaatttcatggttttaagacgcatattaatgaagagattgctaaagcagaactgatgttatcgacaagtaaaatggaaggttttggcttagcaattttagagtcgctttcagtaggtacaccagtgatcagttatgatgtagattatggtccatcagaactgattcaagatggatttaatggctatttagtacctcaaggtgacatcaatcaaatggttgaaaaggtcgaccaattactaaataatactcaaaaattgcaacagttttcaattaatagcatagaatctgcacaacagtacaatgcaactactatcagtacaaagtggcaaaatattttaaactaagtcaaaagaaaaaagcattttcctagaatcatctatttaacaaacctcgttcatacgaacttacatgtttagttaaatgacataggaaaatgctatttttgtaaaaataaaggtaaagtacatttatataagacgaacaaattggtcccattgtttaattaacgacgctttactatattgttgtgcttttgccaaactaccttttgacagtcgttgctgtacttcaggatgatcaatcacatattttactttatcaaatagggcatcttcatcatttttagtaattaaataaccattgaaatctgaagtaatcagttcgttaggtccatatttaatatcataactaataactggaacaccatgtgctaaagattcaagtagcgctaaagagaaaccttccatgttacttgttattaaactcaaataggcatcgctatattcttggtctagattgcttaaaaagccgcgtaagtaaacatgattttccaatccatatttttgtatcaattcatttaattttttactttcagaaccaaaaccatacatatgaagctctatttttgggacatacgatactaagcgtttaattaattcaatttgttgatgtaattgtttttcaggtgaataacgagcaacggaaattaatttaacactgcgctgatctaatgtttggactggtgtatcaattgtttcactatagccgacaggaatattaacaactggaatagtatggttaatacgtttttcaacatctaatttttgctgctcagtagaaacgataattgcacgatatcgagataaattttcaaacatcgctttatatacatttttaaatggcgatgaatctaatgcatcaatatttttaatgtgtgtactgtgaagcacagctactactgggattgactcaggcgttaagttgaaaataggtgctgtgtacacattacgatcactgaaaaataaatccccatgttgatatagttgtttaatgaaaaatgcgcctaattccgtttcattattaaagaaatattgtttgttagcatagtaaacaataattttttgtacttctggtttgccatccttgtaagaaaaatacttttctaattttgtgtcaccttctggattatagaaaaattcacataatgtttgttgtttatcaacaagaatcctactacaacttaaaaagccacgcacatcataaaaatcacgttttacttttcgtctttgactatcaaaatgatttacataatctaatatacgatatttaggatcttgaaaatgggcatacattaagaaacgctcttgatcatatattctaaagtcatgactattttcaacatgttttaaagtataatgacattcatcagtccaatacgacaaccagtcaaatggttcattgcgttctaaatatgttgcttcttggaagaaatcatacatattaatatagtcagaactagtaatataattttgggcatttctatataaatatctattccatgacagaaatacacattgcgctggtcttcccatttctttaaataaatttaaacgattaataattgctttctctatcccagttaaattaacacctaaactattacctacaaaataattcatttacaacaccacttatatctattttttataattatatcacataatatttaattacttcttttaactggaagatgtgtttatttataaaacaacaaattttgatatttataatgatagtagttattcaatcaactacgaccaatatatcattgtagagcttaggatattgatttatgactcaggcacatcaaatgagaagatttataaaagagatatacaactctagaaggtataataaaaacgcgcaactaatgttacgcgtttgaattaatcatatgatattatttgcgatactttaatttagcgaaagcatcatgttgatggatagactcttcattacgacattcgatatcgaaaccgtctaaccaatcaaattcaactaagtccgcggcaattaaacgaattaagtcttcgacaaaacgtggattttcatatgcacgctctgtcacacgtttttcatcaggacgttttaaaatagggtatagaattgaacttgcattagcttccattgcatctaaaattttatttttatagtcatcaactatgtcttgatctttattaatatatgttttaacagtgacaacaccacgttggttgtgcgctgaatactcacttatttcttttgaacaagggcatagcgttgtgacagttgcttcaatagtaagttctttacgtgtaactttatcaccgtcaattgctaatccataagtgacatcggcattaccaactgctttaatatttgtggttggactatagcgatcaaagaaccatttcccagaaacatcaacgcctgccgcattttgtttcatattcgtttgtaaagtgcgtaacacctgataaagtgtattaaattcaagttcaataccattatcatagtgcttttcaacactttcgattatacggctcatattaatacctttttcgtcttttgttaaacttgttgaaaaactaaatgtgccagctgtttgatactggtcaacaagtacagggtacactaagtttttaataccaacttcttctatttcaaataaaaaatctttatgtgtactttgtaaatctgtcatttcgttcttagtagtaggtttcgtgccttcaataggatctacggaaccaaagtgtttccaacgaccttctcgtgtcgataaatcaaattcagtcatttttttcctccgttaagatttaaagtgatatgtccaatatggttcgactgttaaaaagctgtgttgtttaccatcgatttcaggacttgctaattgttttaaaaatggacctgtttgagaagcatgtgcttcaaatgccttaattttaagttctttaaaatctgtaatatcattttgaatatcaggttctccaagagcttcggttgcatcattactgaacgcaactaaagttaaacgagggcgttcttctttaggcatgcgttcaaccgttcgaattacagcgtctgctgttgcttcgtgatcaggatgtactgcatatccaggataaaatgaaataatcaatgatggatttgtatcatcgattaaagatttaatcataccatctatatgttcatagggttcaaattcgacagttttgtcacgtaaacccatttttcttaaatcagtaataccgataactttacaagcttcttctagttcacgctcacgaatacttggtaatgattcgcgtgttgcaaatgggggattacctaaatttctgcccatttgtcctagggttaaacatgcatatgttacaggtatgcctttttggatataatttgctaatgtgcctgcagatgagaaggtttcatcatcaggatgtggaaatattactaatacatgtctttcgtcagtcatgttgatgcctcctctataaattaaatggtcgctcactaatttgaagtgctgcagcgagttgaccttcgtaattaaaacctgcaattaaaaattcatcatgctcattgacctcaaaatgcgttagaccttgtacataaacccaaccaccatttgatagtttaagaccaatgcgataaggttctttattaccaccttttagttgtgcatgcgtatatgttatttgtatgtttcttaaaaaagtaccagcattaaaaacacgttgatcgaaatggttcgcataggccccatttgtcgtttcaacatgcagatacacaggtttatgttcaaaagaagcaagtaaatctataacttcttgttctttaattggttccaacacgttcactccttacactatcaatgtgtttatctttctattttactaaaaactattcgataattgtatacgattgctcaattatttataaattaattttcatgaagggtaattactcaggattacgtaatcatacagcattagttttttacttttaaaaatcaaaaatttgttggaatttgaaaagtgttaaacattaaaaatgatgctatattaatggtgtatgaatgaattcataagtttttaaaatgtattaaatttgtggaggcatgtaaacaatgaaagtattaaacttaggatcgaaaaaacaagcatcattctatgttgcatgtgagttatataaagagatggcatttaatcagcactgtaaactaggtttagcaactggtggtacaatgacagatttgtatgaacaacttgttaagttattaaataaaaatcagttaaacgtagacaatgtatccacgtttaatttagacgaatatgtaggtttaaccgcatcacatccgcaaagttatcactattatatggatgacatgcttttcaaacaatatccttattttaatagaaagaacattcatattccaaatggagatgccgatgatatgaatgcggaagcgtcaaaatataatgacgttttagaacaacaaggtcaacgtgatattcaaattttaggtattggtgaaaatggtcatattggatttaatgaacctggtacgccgtttgatagcgttactcatatcgttgatttgactgaaagtactattaaggctaatagtcgatattttaaaaacgaagatgatgttccaaagcaagccatttcgatgggacttgctaatattcttcaagccaaacgtatcattttactcgcatttggtgaaaagaaacgtgctgctattacacatttattaaatcaggaaatttctgttgatgttccagccacattacttcacaaacacccgaatgttgagatatatttagacgacgaagcttgcccgaaaaatgttgcgaaaattcatgtcgatgaaatggattgattgcaatgtttaattaagaaatgcctcgggaaaggttccaatagaaagataaaaagcattggaaggatgatttttagtggaattacaattagcaattgatttattaaacaaagaagacgcggctgagttagcaaataaagtaaaagattatgtagatatcgtagaaatcggtacgccaatcatttacaacgaaggtttaccagcagttaaacatatggcagacaacattagtaatgtaaaagtattagcagacatgaaaattatggatgcagctgattatgaagttagccaagcaattaaatttggcgcggatgtaattacaatactaggtgttgcagaagatgcatcaattaaagcagctattgaagaagctcataaaaataataaacaattactagttgatatgattgctgttcaagatttagaaaaacgtgcaaaagaactagatgaaatgggtgctgattatattgcagtacacactggttatgatttacaagcagaagggcaatcaccattagaaagtttaagaaccgttaaatctgttattaaaaattctaaagttgcagtagcaggtggaattaaaccagatacaattaaagatattgtcgctgaaagtcctgatcttgttattgttggtggcggaatcgcaaatgcagatgatccagtagaagctgcaaaacaatgtcgcgctgcaatcgaaggtaagtaatatggctaaatttagtgactatcaattaattctagatgaattaaagatgactttgtcacatgttgaagcggatgagttttcaacttttgcatccaaaatactacatgctgaacatatatttgtagctggcaaaggacgttcaggattcgtggcgaatagttttgcaatgcgcttaaatcagctcggcaaacaggcacatgttgttggagaatcaacgacacctgcgattaagtcgaatgatgtatttgtaattatctctggttcaggttccacggaacatttaagattattagcagacaaagcaaaatcagtaggtgctgacatcgtattaattactacaaataaagattctgcaataggcaatctagctgggacgaacatcgttttgcctgcaggtacaaaatatgatgaacaaggctcggcacaaccattaggaagtttgtttgaacaagcatctcaattatttttagatagtgttgtaatgggattgatgactgaaatgaatgttacggaacaaacgatgcaacaaaatcatgctaatttagaataaaataaagatagtcgataatatgatgcctaggcagaaatattatcgattatttttttatttaaataataaattatagtataatatcaataataaacgaataggggtgttaatattgaagtttgacaattatatttttgattttgatggtacgttggcagacacgaaaaaatgtggtgaagtagcaacacaaagtgcatttaaagcatgtggcttaacggaaccatcatctaaagaaataacgcattatatgggaatacctattgaagaatcatttttaaaattagcagaccgaccattagatgaagcagcattagcaaagttaatcgatacatttagacatacatatcaatctattgaaaaggactatatttatgaatttgcgggtataactgaagccattacaagtttgtataaccaagggaaaaaacttttcgtggtgtctagtaagaagagtgatgtattagaaagaaatttatcggctattggattaaatcacttgattaccgaagctgttggatccgatcaagtaagtgcatataaaccaaatcctgaaggcatacacacaattgtgcaacgctacaatttaaatagccaacaaacggtgtatattggtgattcaacgtttgatgttgagatggcacaacgtgctggtatgcaatctgcagctgtcacttggggtgcacatgatgcaaggtcattacttcattcaaatccggattttattattaatgatccatcagaaattaataccgtattataaaacttgttaaaacagagaataccatggttaaaatgcatattcataaatattagattatacttagaaatatttcgctttagattaggaatttaaaataaatatttattaaacattatgaatttttaaagagtaatgtctgactcgttgataatttatttttgtaaaaataaattaaagtaatgacaaagttattgaagtaaattgagtataaacatttaaatacgatgtcgaaaatggcgatagcatatcacttacatgaagttgtgtgctatcgctatttttagttataattccaaaaagttaatcgttcgatgatttaagaattattattgtttaattcaaatgtatgagggtataaaatcattgaatttaattcgataaagcgaaatttttgaacaaacatacttttgtatttatataaaagtttaaattcttataaatttgacaaaactaattaactccgtataattatgaaacatacaagagggagtgtatgaattcatggattttaataaagagaatattaacatggtggatgcaaagaaagctaaaaaaaccgttgttgcaaccggtatcggtaatgcaatggaatggttcgattttggtgtctatgcatatacaactgcgtacattggagcgaacttcttctctccagtagagaatgcagacattcgacaaatgttgactttcgcagcattagccattgcgtttttattaagaccaattggtggtgtcgtatttggtattattggtgacaaatatggacgtaaagttgtattaacatctacaattattttaatggcattttcaacattaaccattggattattgccaagctatgatcaaattggactttgggcaccaatactattattgcttgcaagagtactacaagggttttcaacaggtggagagtatgcgggggcaatgacatatgttgccgaatcatctccagataagcgtcgtaactcattaggtagtggactagaaattgggacattatcaggttacatagctgcttcaattatgattgctgtattaacattctttttaacagatgaacaaatggcatcatttggttggagaatcccattcttactcggtttattcctaggattattcggcttatatttacgtcgtaagctggaagaatcaccagttttcgaaaatgatgttgcaacacaaccagaaagagataacattaactttttacaaatcatcagattttattacaaagatatatttgtatgttttgtagctgttgtattcttcaatgttacaaactatatggtaactgcatatttaccaacctatttagaacaagttattaaattagatgcaacgacaacaagtgtattaattacttgtgtcatggcaataatgattccattagcattaatgtttggtaagttagcggataaaataggtgaaaagaaagtatttctaattggtactggtgggctaacattattcagtatcatcgcatttatgttattacattcacaatcatttgttgtaatagtaatcggtatatttatattaggatttttcttatcaacttacgaagcgacaatgccagggtcgttaccaacgatgttttacagtcatataagatatcgaactttatcagtaacatttaatatctctgtttcgatatttggtggtacgacgccattagttgcaacatggttagttacgaaaactggagatccattagcacctgcgtattatttaacagcaatcagtgttattggctttttagttattacattcttacatttaagtacagcaggaaaatctctaaaaggttcgtatccaaatgtagataacgagcaagatagagcttattatgcagaacatccaaaagaagcattatggtgggttaaagaacgtaagaattagagattttaataaaaagtataaatcaatcgtatataagcactttaaagctagtaggttctgctaactttaaagtgctttttaaattgagaactgtaattagccgtaataaagtttttgtatatacataaacccccactgcaatgattatcgcaatgggggaaagaggggacttaaagcatatgtttagctttgaatacttaaaattctcttgctattgaaatgttaggatgtaaatatgtcttagagtattttgtccaacgcaattaatattgagactctaaccttcaatattattatagagaacacaaacttaaatagattgggtgacttatttgtgtcagttattgcgattgcgataacttcttttctctatatacatatagtaacgtcttatctaataaaaaacatggtactacagtatcaaatttatctagggcttaagtttgatttttataataggcaggtttacctgataaaaatacttattcattatataatgttaacaatatgtattttaaagtttacattgagtgagggatattgatgaacgtaattttagaacagttgaaaacacatactcaaaataaacctaatgacatagcattacatatcgatgatgaaacaattacatatagtcaactaaatgcccgcatcactagcgcagttgaatctttgcagaaatattcacttaaccctgtcgttgctattaatatgaaatcaccggtgcaaagtattatttgttatttagctttgcatcgtttacataaagtgcctatgatgatggaaggtaaatggcaaagtactatacatcgtcaattgattgaaaaatatggtattaaagatgtaattggagatacaggtctcatgcagaatatagactcaccgatgtttattgattcaacgcaattacagcactaccccaatttattacatattggttttacttcagggacaactggactgccaaaagcatattatcgtgatgaagattcatggttggcttcttttgaagttaatgaaatgttgatgttaaaaaatgaaaatgcaatagcagcccctggaccactatcgcactcgttaacattatatgcgttattgtttgctttaagttccggtcgtaattttataggacagaccacttttcatcctgaaaagttacttaatcaatgtcataaaatatcatcatacaaagttgctatgtttcttgttccaacgatgattaaatcattattgttagtttacaacaatgaacatacaatccaatcattttttagcagtggagataagctgcattcttctatttttaaaaagataaaaaatcaagcaaatgacataaatttgattgaattttttggtacatcggaaaccagttttatcagctataacttgaatcagcaagcaccagttgaatcagtaggtgtgctatttccaaatgtggaattgaaaacaacgaatcacgatcacaatggtataggaactatttgtataaaaagtaatatgatgtttagtggctatgtaagtgaacaatgtataaataatgatgaatggtttgttactaatgataatggctatgtaaaagagcagtatttatatttaacgggacgtcaacaggatatgttaattattggtggtcaaaatatatatccagcacatgttgaacgccttttaacgcaatcttcgagcattgatgaagcaattatcatcggtattccaaatgagcgttttggtcaaataggcgtattgctttattctggtgatgtgacacttacacataaaaatgtaaaacaatttttaaaaaagaaagtgaaacgctatgaaattccatcgatgattcatcatgtagaaaagatgtattacactgcaagtggtaaaattgctagagaaaaaatgatgtcgatgtatttgagaggtgaattataatatgaatcaagcagtcatagttgcagctaaacgaactgcatttgggaaatatggtggcactttaaaacatttagagccagaacaattgcttaaacctttattccaacattttaaagagaagtatccagaggtaatatctaaaatagatgatgtagttttaggtaatgttgttgggaatggtggcaatattgcaagaaaagcattgcttgaagcggggcttaaagattcaatacctggcgtcacaatcgatcggcaatgtgggtctggacttgaaagtgttcaatatgcatgtcgcatgatccaagccggagctggcaaggtatatattgcaggtggtgttgaaagtacaagtcgagcaccttggaaaatcaaacgaccgcattctgtgtacgaaacagcattacctgagttttatgagcgtgcatcatttgcacctgaaatgagcgacccatcaatgattcaaggtgctgaaaatgtggccaagatgtatgatgtttcaagagaattacaagatgaatttgcttatcgaagtcatcaattgacagcggaaaatgtaaagaatggaaatatttctcaggaaatattacctataaccgttaaaggagaaatattcaacactgatgaaagtctaaaatcacatattccgaaagataactttggccgatttaagcccgtgatcaaaggtgggaccgttaccgctgcgaatagttgtatgaaaaatgatggtgcagttttattgcttattatggaaaaagatatggcatacgaattaggtttcgagcatggtttattatttaaagatggtgttacggtaggtgttgattctaattttcctggcattggtccagtaccagccatttccaacttactaaaaagaaatcaattaacgatagaaaatattgaagtcattgaaattaacgaagagttcagtgcacaggtagttgcctgccaacaagctttaaatatttcaaatacgcaattaaatatatggggtggtgcattagcatcaggtcatccatacggtgcaagcggtgcccaattagtgactcgattattttatatgtttgacaaagagactatgattgcatctatggggatagggggaggtctaggaaatgcagcattatttactcgattctaaccagcgattaaatgtgtcattttctaaggatagtgtggctgcatattatcagtgttttaaccaaccttatagaaaagaagtaccaccattaatgtgtgcgtcattatggccaaaatttgatttatttaaaaaatatgcaaatagcgaactgattttaacaaaatcagcaattaatcaaactcaaaagatagaagtagacacaatatatgtagggcatttagaagatattgaatgccgacagactcgcaatatcacacgttatacaatggctttaacattaactaaaaatgatcaacatgtcataacggttacacaaacttttattaaggcgatgaagtagagatgaagtttaatgagatatggataaatgaatatttggcgctcgtaaatgatgataatccaatacataatgagattgtgccaggacaattagtgagtcaaatgatgctgatggctatgtcattagagacaaaccagtgtcaaattaactacgttaaacctattttaataaatgaaaatatcgaattcattgaacaacacgaacacgaaattatagcaattaatgacgatggagagattaaaataaaaatttctttgagcacaaaaaaataaccgatattagctgcatgaacgcatattaattaggagatgaaaggacagctaatatcagttatgtattgttattattattgggaacagagatgaatataggttacgtttctttctttgcacggggatgcattaatctaaaataataataacaactatatcaatgtttaataaattctggattattggaacgattagtcaatttaactaactttcatatgatctatatcgtcttgtaataaagagagcaatttgaatatttcagtatcactaaatgaatcgtcacatttaattgaaacatgctgaaacgttttggttataatttcataaactggtgcgccttcatggtgatactgtcgataaataatcataacctatattacctcctttgctactctatggttatattataaataacatttttatgtgtgacatcaaccttaagtatcaactttttatcagacatagaacgtatgatttactaagactatttatgtataaaagttctaaataaatatatatttatagagtcgcctggcagtcatttgggaaatataacatatatgattagagaggcatctatcgcaaaagaatgataatgatagaggtattgagcatatagatgagtttaagttcatcttgaaaataaagggttatttagtcatagatgtagatgtataggaaatatttgtatgtattgttcgatatgtatgaaattttcaataaaagctaataacgcttatatgtaactttcaaatttaaattatatacagagcatgatgattataaaaaaataaccacatcacataaattgagttcatacccaatttaagtggtgtggctaataatgttgatttatagatgaaccgcctaatcgttaaacctctgttacttcaacatcgatatgttcaatacggttgtatgcaccgtgatccacaggaccaacaaaatcattcattttccaaccgtttttaatagcagaagcgacgaaagctttcgcgctaatcacagcttctttcggtgacttaccgttagctaaatatgcagttgttgccgcagcaaatgtacaaccagcaccatggttataactttgttggaacatgtctgttgttagttgataaaatgtttgaccatcatagtataagtcatacgatttatcttgatctaaagctttgccacctttaatgatgacatgctgtgcgcctttatcaaagataattgttgcagcctttttcatatcttcaattgaatttaatttacctaatcctgataattgacccgcttcaaataagtttggtgtcactaccgttgctttaggtagtaaatatttaatcatcgcctcagtatttccaggattaagcacttcatcttcgcctttacaaaccatgacaggatctactacaaaatattgtgcattagatgcctcatatacttctccagcacgtttgattatctcctcagtacctaacatacctgttttaatagcatcaggtccgattgataaagccgtttcaagttgtttttcaaatacatccattggtaatggtgtaacatcgtgtgaccatgtatctttatccatagtaacgatggcagttaaagcgaccatgccatacgtatctaattcttggaacgttttcaaatctgcttgcatacctgcgccagcacttgtgtcagaaccggcaattgttaaaactttctttaaagccattgagcttcactcctacataataatattgtattcatcatatcatttttaacctaattgaaaaatattaagcattcaatatttgatgattgttgaaatgaatcattcatactattgtaacttttgaaaatgtcattcactttagataagtgtgatatgttaaaatatgtcctgaggtgagattgaatggaatggtcgcaaatttttcatgacataacaacgaaacatgactttaaagctatgcatgattttttagaaaaagaatattcgactgcaatcgtataccctgatagggaaaatatatatcaagcgtttgatttaacaccgtttgaaaatatcaaagttgttatattaggacaagacccgtatcatggtccaaaccaagcacatggattagcattttcagtgcaacctaacgcaaaattccctccatctttacgtaatatgtataaagaattagcagatgatattggatgcgttagacaaacaccgcatttacaagattgggcaagagaaggcgtcttgttattgaatacagttttaaccgtaagacagggtgaagcaaattctcatcgtgatattggttgggaaacatttactgatgaaattattaaagcagtgtctgattataaagaacatgttgtctttattttgtgggggaaacctgcacagcaaaaaataaagcttatcgatacatctaaacattgtattataaaatcagtgcatcctagtccactgtctgcatatagaggattctttggatcaaaaccgtattccaaagcgaatgcctatttagagtcagtaggaaaatcaccaattaattggtgtgaaagtgaggcgtagatgttgaatagagaaactttaatagcacgaattgagcaagaattagtacaagcagagcaggcacagcatgaccatgactttgaaaaacatatgtatgccatacatatattaacatctttatatgcttcaacatcaaatacaccacatattggtgaacaacaaatgaatcgtcgtattgctaaccataatcaaatgccacaatcacaaataacgcagccaactcatcaagtgacagttgctgaaattgaagcgatgggtggtaaagtaaatacgcattcagcacatcatcataataagtcatattcacaaccttcaaaccaacaacaaagattagcgacagatgatgacattggcaatggtgaatccatatttgatttttaaaaagcaacaatgaaacataattacttaatagcttgttaagtatgtaggttaataatcaagacgcatatacttttattcgagtgttcggatttaaacatttattaatactgaattatataaggagaggtagcaatgaaattatttattattttaggtgcattaaacgcgatgatggctgtcggtacaggtgcatttggtgcgcatggtttacaaggaaaaataagtgatcactatttatcagtatgggaaaaagcaacgacgtatcaaatgtaccatggcttagcattattaattataggtgtaattagtggtacaacttcaatcaatgttaactgggctggctggttaatatttgctggtattattttctttagtggatcattatatattttagtattaactcaaattaaagttttaggtgcgattacgccaattggtggcgtattgttcatcattggatggataatgttaatcattgcgacattcaaatttgctggttaaattttaaaactttagattacctatgtaactaaacattaaatttttaataaaaataatcaagaaaaagagttacaaactcatcttttgggtatagaataccttcgaggtgagtttttatttatggaaaaaaagaataagcaaatagatagaggcgatttaaaacaaaacctatctgaaaagtttgtatgggcgattgcatatggttcatgtatcggatggggcgcattcatcttaccaggagactggattaagcagtcaggtccgattgcagcatcaattggtatagttattggtgcattattaatgatattaattgcggttagttatggcgcattagtagagagatttccagtatcagggggcgcgtttgcctttagtttcttaagtttcggcagatatgtgagtttcttctcatcatggtttttaacttttggttatgtctgtgtcgttgctttaaatgcgaccgcattcagtttactagttaaattcttattgccagatgtcttaaataatgggaaactatacaccattgcgggctgggacgtttatattacggaaatcattattgcgaccgtattactacttgtattcatgctagtaacgattcgtggcgcaagtgtatctggatcattacaatattatttctgtgtggcgatggtaatcgtcgtattattgatgttctttggttcattctttggtaataattttgcacttgaaaatttacaaccgttagctgaacctagcaaaggatggttagtgtctattgtggttattgtatccgtggcaccatgggcatatgttggatttgataatattccacaaacagcagaagagtttaactttgcaccaaacaagacatttaagcttatcgtgtacagtttattagcagcatcattaacttatgttgtcatgattttatacactggttggttatcaacaagtcatcaaagtttaaatgggcagttgtggttaacaggtgctgttacacaaacagcatttggttatattggattaggtgtattagcaattgcaattatgatgggtatatttactggtttaaatggattcttgatgagttcaagtcgcttgttattttctatgggacgttcaggtattatgccaacaatgtttagtaaattacatagtaaatacaaaacaccatatgtcgcaatcatattcctagtaggagtgtcgttaattgcaccttggctaggaagaactgcattgacttggattgtagatatgtcatctactggtgtatccattgcctactttattacatgtttgtctgcagcgaaattattcagttataacaaacaaagtaatacgtatgcaccggtttacaaaacgtttgctattatcggctcatttgtatcattcattttcttagcgttgttattagtgccagattctcctgcagcactgactgcaccgtcttatattgcattacttggatggttaatcatcggtttaatattctttgtgattcgatatcctaaattgaaaaatatggataatgatgaattaagtcgcttgattttaaatagaagtgaaaatgaagttgatgatatgattgaagaacctgaaaaagaaaaaactaaataataaaagaatcgcacaataaaccttcttcattcggaggcgtatcgtgcgattttttgtattataaattgacatttaagacgaggcagctgaaccttatatataattgctaatagttagggctgagccatttctaacaaatatttataatcgtttaaaagatttcacgaacccagaaacaattaatttggaaatttggtcggcgaataataaacctaatgcgatggcgcctgcaataagtgtaacctctagcatggtattgattgctgtactgaaatttaataagactaaattttttgtagcatcgtatgctaagccaccaggtactaatggaatgatacccgttaccataaaaatgatggcaggttctttttgtttacgagccatataatgacttaacaagcctaatgctaaactaccaaagaaactagagtatatagtgtgcacattaaagccgttgaagaataaggtgtaaaccatccatccacacgtaccaacgaaaccacatgatagatataattttctaggtgcatcaaaaatgacgcagaagaacattgaagctaaaaagctaaagataaagtttaagatccaaaacatagtctgatactcctatactaaaattaatacgctaccaacgccagcaccgatgccaaacgcagtaaccaatgcttctaatgatttcgttgtgaacatcaacatgtgtccaccaaataaatcttgtattgcgtttgttattaatacaccaggaacaataggcatgactgccgcaatgataatagttgccaagtcacctgttggaataagtgtatgtccaataacggcgataatcccaataactaatgaaccaatgaattctgggataaactgtgcgtgtaacttacgatctaaaatctcagtgactaggtatcctagactacctgctaatatcgcagttaaaacatcaatcaatctaccaccttgtaaatataagaaactcattgcaatcattgctgcagcaaaacctttaaagggaagactgctgtcacgcttagcaacatatattttttcaagttgcgtttttgcttcggctaaagaaatttcattgtttgtaatttgacgcgaaattttattagcttgagaaatttttattaagtttgtatctcgagaggtaattctaaatattctaggaaacgattccgaatgtaacgtaaactggatgacagtgtttgtaacaaagctgttactttcactgtaaccaagtttttttgcaatacgtgtcatggtatcttctacacgcgtaccttctgcaccagattctaatagtatgcgagcagcaagcatgacaacgtctttgataagtacctcttgtttgtattcttctgaatttatgtccatttcatcaccattgtttataagaatttaatactcattatagtttatacactataaaataaccacatgagctttttgataagttgttattgattttaaaaaactaatatttgatactattgtaataataatcatcggaatttttagtagttaaaattctcttgaagtataaaaaggaaaaattattgaaaaaattcgacaaaaatatgtttcaaatatttcaaataggttaaaataatattagttaaccattacaaaaattgtatagagtagcgactgtataatttctattgaggttaacgtttatatgtagtgatagtagttaaagttctcccaaggaagactactcgggtacactttgctatgagcaaagtgtactttgttattgataatacattagcacatatatataagtttaaacatacagatttcaactatttaccaaatcacgtcttatgtatacgggaatatactgaagataaacgaaaaattccaagcttaaaccgataagcttggaatttttttattaatttataaacgtaccaatgtattaagaaatcgcaaagaattgatcgaattcgtttgtgttaataatatgtcctacaaagaaactaccgaattcaccgtatcgtgctgttgtttcatcaaagcgcatttcgtatacaatttttttgaattgtaatacgtcatctgagaacaatgttacgccccattcgaaatcatcaaaccctacagaaccagtaataaattgtttgattttgccagcatattttctaccaatcataccatggtcatacattaatttttggcgttcttccatagttaacatgtaccagttataagtttcattacgacgtttgttcattggatagaaacaaatataatcagaatgtggtaattctgggtataatcttgctttgatatgagggttctcataaggatcttcatcagatttaccagctaaataattgctcaattcaatgactgatacatatgaatatgtagggattaggaagtcagcaatgcgcaatttgttaaattcattttcaatatgatttaaagacttcatttcaggacgtaagaaccataataacaaatctgctttttgaccagttatattataaatagcttgatcaccagattttgatgatcttacagttgctgtattttctaaaaatgattgaaattcagtgacaagtgcatcgcgttcgtcctttggaactatacgtaatgatgcccaatcaactgcataaaataaatgtagactataccaaccatctaatgtttcggctgcttgactcatgtttatcgctccttttcaaaaatcatcagttctttataaattttatcataaagcaaaggggtaacgataaaattatgattacaaattggtgacgtggcattatgaaataaaatggcgtataattataccgtgaatgattaataagatttatattacaggaggacattatggctgatttattaaatgtattaaaagacaaactttctggtaaaaacgttaaaatcgtattacctgaaggagaggacgaacgtgttctaacagctgcaacacaattacaagcaacagattatgttacaccaatcgtgttaggtgatgagactaaggttcaatctttagcgcaaaaacttgatcttgatatttctaatattgaattaattaatcctgcgacaagtgaattgaaagctgaattagttcaatcatttgttgaacgacgtaaaggtaaagcgactgaagaacaagcacaagaattattaaacaatgtgaactacttcggtacaatgcttgtttatgctggtaaagcagatggtttagttagtggtgcagcacattcaacaggcgacactgtgcgtccagctttacaaatcatcaaaacgaaaccaggtgtatcaagaacatcaggtatcttctttatgattaaaggtgatgaacaatacatctttggtgattgtgcaatcaatccagaacttgattcacaaggacttgcagaaattgcagtagaaagtgcaaaatcagcattaagctttggcatggatccaaaagttgcaatgttaagcttttcaacaaaagggtctgctaaatcagacgacgtgacaaaagttcaagaagctgtcaaattagcacaacaaaaagctgaagaagaaaaattagaagcaatcattgatggcgaattccaatttgatgctgcgattgtaccaggtgttgctgagaaaaaagcgccaggtgctaaattacaaggtgatgcaaatgtctttgtattcccaagtttagaagctggtaatattggttacaaaattgcacaacgtttaggtggatatgatgcagttggtccagtattacaaggtttaaattctccagtaaatgacttatcacgtggctgctcaattgaagatgtatacaatctttcaattattacagcagcgcaagccttacaataacgatggatttagcgagtaaatattttaatggcgtcaactggcgatatatcgatcattcttctggattagaacctatgcaatctttcgcattcgatgatacattttgcgaaagtgtgggcaaagatatatcagataatgttgtgcgtacttggattcatcaacatactgttattcttggtattcatgattcaagattgccgtttttaaaagatggcattgattatttaacgaatgagattggttataatgccattgttagaaattctggtggcttaggtgtcgttctagatcaaggtgtattaaatatatcgctgatgttcaaaggacaaacagaaacaacgattgatgaagcgtttactgtgatgtacctcttaattagcaaaatgttcgaaaatgagaatgttgatattgatacgatggaaattgaacattcttattgcccaggaaaatttgacttaagtatcgatggtaagaaatttgcaggcatatcgcaacgaagagttagaggcggtattgctgtacaaatttatctttgtgttgaaggctctggttcagaacgtgcattgatgatgcaaacattttatgaacatgctttaaaaggtgaagtgactaaatttaaatatcctgaaattgaaccatcttgtatggcctcattagagacattgcttaacaaaacgattactgttcaagatgtaatgtttttactattatatgcaatcaaagatcttggcggtgtattaaatatgacgccaattactcaagaagaatggcaaagatacgatacgtattttgataaaatgattgaaagaaacaagaaaatgatagatcaaatgcaatagttaaatatttaacagcccctttcaagttatcgtttggggctgttatttttgaaagtatccataaaaagcataaatatgttattgacctaatatttaaattgaacatcattaaattaaaagtaatgatatgatggaaataataaatttaataagaaaatttcatgttttacgtattaaatagattgagaatagggtatatataatgcgtatgactatgaaagaaacgaccttctattgaaatgttctaatactttagtagtaaatctatatattccaattattatttgtagtattatagttagggtggaaaattataaattgtagggctattttataaaaagataaagaatctgaaatatcactcgataagatttaaactttgaagtaaacgaaagttagttttatactaatcaagttaagtcaaatataaattcaaaataaagattatacataatatgaataatgtgagataaagactgcaatgaaatttaacgcgaatgcgtatgcaacttagaatatgatgtcttttactaataaataaaaataatgaatcaagtataggataaatataaaaggtgatattgacatgacaagaaaaggatatggggaatcgacaggtaagattattttaataggagaacatgctgttacatttggagagcctgctattgcagtaccgtttaacgcaggtaaaatcaaagttttaatagaagccttagagagcgggaactattcgtctattaaaagcgatgtttacgatggtatgttatatgatgcgcctgaccatcttaagtctttggtgaaccgttttgtagaattaaataatattacagagccgctagcagtaacgatccaaacgaatttaccaccatcacgtggattaggatcgagtgcagctgtcgcggttgcttttgttcgtgcaagttatgattttttagggaaatcattaacgaaagaagaactcattgaaaaggctaattgggcagagcaaattgcacatggtaaaccaagtggtattgatacgcaaacgattgtatcaggcaaaccagtttggttccaaaaaggtcatgctgaaacgttgaaaacgttaagtttagacggctatatggttgttatagatactggtgtgaaaggttcaacaagacaagcagtagaagatgttcataaactttgtgaggaccctcagtacatgtcacatgtaaaacatatcggtaagttagttttacgtgcgagtgatgtgattgaacatcataactttgaagccttagcggatatttttaatgaatgtcatgcggatttaaaggcgttgacagttagtcatgataaaatagaacaattaatgaaaattggtaaagaaaatggtgcgattgctggaaaacttactggcgctggtcgtggtggaagtatgttattgcttgccaaagatttaccaacagcgaaaaatattgtaaaagctgtagaaaaagctggtgcagcacatacttggattgagaatttaggaggttaatgcgttgattaaaagtggcaaagcacgtgcacatacgaatattgcacttataaaatattggggtaaaaaagatgaagcactaatcattccaatgaataatagcatatctgttacattagaaaaattttacactgaaacgaaagtcacttttaacgaccagttaacacaggatcaattttggttgaatggtgaaaaggttagtggcaaagaattagagaaaatttcaaaatatatggatattgtcagaaatagagctggcatcgattggtatgcagaaattgaaagcgacaattttgtaccaacagcagcagggttggcttcatcggcaagcgcatatgcagctttagcagcagcttgtaatcaagcgctagacatgcagctgtcagataaggatttatcgagattggcgcgaattggttcgggttctgcgtcgcgtagtatttatggtggatttgcagaatgggaaaaagggtatagtgatgagacgtcatatgccgttccacttgaatcgaatcattttgaagatgaccttgccatgatatttgttgtgattaatcaacattctaaaaaggtacctagtcgatatggtatgtcattgacacgaaacacatcaaggttttatcaatattggttagatcatattgatgaagatttagctgaagcaaaagcagcgattcaagacaaagattttaaacgccttggtgaagtaattgaagaaaatggtttgcgtatgcatgccacgaatctaggatcaacaccgccgttcacatatcttgtgcaagaaagttatgatgtcatggcgcttgttcacgaatgccgagaagcggggtatccgtgttattttacaatggatgcgggacctaatgtgaaaatacttgtagaaaagaaaaacaagcaacagattatagataaattattaacacagtttgataataaccaaattattgatagtgacattattgccacaggaattgaaataattgagtaaggaagagataaaatgattcaggtcaaagcacccggaaaactttatattgctggagaatatgctgtaacagaaccaggatataaatctgtacttattgcgttagatcgttttgtaactgctactattgaagaagcagaccaatataaaggtaccattcattcaaaagcattacatcataacccagttacatttagtagagatgaagatagtattgtcatttcagatccacatgcagcaaaacaattaaattatgtggtcacagctattgaaatatttgaacaatacgcgaaaagttgcgatatagcgatgaagcattttcatctgactattgatagtaatttagatgattcaaatggtcataaatatggattaggttcaagtgcagcagtacttgtgtcagttataaaagtattaaatgaattttatgatatgaagttatctaatttatacatttataaactagcagtgattgcaaatatgaagttacaaagtttaagttcatgcggagatattgctgtgagtgtatatagtggatggctagcgtatagtacttttgatcatgaatgggttaagcatcaaattgaagatactacggttgaagaagttttaatcaaaaactggcctggattgcacatcgaaccattacaagcacctgaaaatatggaagtacttatcggttggactggctcaccggcgtcatcaccacactttgttagcgaagtgaaacgtttgaaatcagatccttcattttacggtgacttcttagaagattcacatcgttgtgttgaaaaacttattcatgcttttaaaacaaataacattaaaggtgtgcaaaagatggtgcgtcagaatcgtacaattattcaacgtatggataaagaagctacagttgatatagaaactgaaaagctaaaatatttgtgtgatattgctgaaaagtatcacggcgcatctaaaacatcaggcgctggtggtggagactgtggtattacaattatcaataaagatgtagataaagaaaaaatttatgatgaatggacaaaacatggtattaaaccattaaaatttaatatttatcatgggcaataaatgatttgataggggagcaatcatctaatttaattagaagataaatgctccattttttattgtcagccgtgttacgtatcttgaaaaaaatattaaaaagagtaaaatagatagagttaacgaaaaaattaatgaaatcgacgatatagatatgataaagaaaggtgggtagcaatatgaaaaatacattccttatttgtgatgaatgtcaggcagtcaatataagaacgttacaaaagaagttggaaaaattagatcccgatgctgaaatcgtgataggttgtcaatcttattgtggacctggacgccgaaaaacattcacttttgttaataaccgcccactggctgcgcttactgaagaagaattaatcgaaaaagtttctcaacaattaaagaaaccacgtgatcctgaagaagaagagcgtttaagaaaacgacatgaagaacgtaaacgtcgtaaagaagaacaagatagaaagcttaaagaaaaattagaaaagcgaaaagcacaacaataaagcctgatggcagcatcattcaatgcgtgccaccaggtttttatgttttgtctagaaattaaataaatcattaaatgattcggccatcgtaggatgcgtataaatattatctcgtaatacggtatatggaatgttttgatcaatcgcaagtttaattatattaattaattcttcagattgcttaccatataatgtagcacctaaaatcatattattttcattattaatgactactttaaataaacctcttggatcattgttaattttatgacgaggtatagcacttactaaaagttgatgttcagtgtaatcataatgttgagcggcagcttctttactagttaatccaacacgtgataatggtggatctataaatactgtataaggcacgctgcctctattgtcagtcgtacgtgactgattaccatataacgctgatttgataattcgataatcatctaaagatatatacgtaaattgaagtccgcctttaacatcacctgcagcataaatatgcggcacagttgtttgaagatgagcattgactttaatttcgcctctgtcgcctaattcgatatcagtattttctaaagctaaatccgtattcggtttgcgcccgatagccaaaagtactgcatcagcctcaaagttatcaacgttggtatggactgttgtatgatgattgtcagatgacaattcagtcgtttcaacatttgtatgcaatgcaatgcctttattttctaagtcagtaataccatatgcaacgacatcttgatcttcgcgtggcataaatgattcgccacgttctaatactgttaccttactacctaaattcgcaaacattgaagcaaattctaaggcgatataaccgccacctacaataacgaggtgcttaggttgatagctaatgtttaataaacctgtcgaatcgaagacgtgtttagcttgatcaaggcctttaatgttaggaatgacagaggtagcaccggtattaataatgatatgaggtgcagtaatactatcgacgatatcgtcatgttgatctaataaattcacttcagtattagatttaaactgcgctttaaaatccagtacatcaatgttgttatcgtctgctaataagtggtaatttttattgtttagcgcattgacaacatcgtttttacggttataacttgcttcaaaagatttgccttctaatccatcatgtacaagtgtcttcgaaggtatacatcctatgtttatacaagtgcctccatacattttcggagattgttcgataactgcgacgtgttgacctgttgatgcagcgtatttcgctaaagttttaccagctttcccaaatcctattacaattaaatcatatgttttcatgacataaatcctccttttgaatgtcttcaatgacatctttgattgtttttccattataaaaattaataatgatattctgttcgtcttgctgataatgtgacatggtagttgcaatattacgagcaatttgacagtgactgccttcgtcgccagtaaatagacgtgtgtggtgttctttctctaagacaaaatgtttatataatgttgctagagagacatcagcactttgatcatttgctaaataaccgccatctttacctcgtattgtgtcaatcatttttaaatcgacaagttgagtcgtcacgcgtcgtaattgaacaggatttaaacaagttaattctgctaatgaactactattgaatttttctgaatgatgcttagttaaaaaagctaatacatgcacggcaatgttaaattctaaattcaatgtttctcacctcataattgtaactgtattagttacaattaaaaatcattttgctcaatgtgtcaatacttatgtttgaaaagtgttgaattaggtgtggttattgtgatgatttattgtttgaaagttgatgcattaacggtgagattgcacaattgaaattttaattatgtatgaactgatagatatgaaatgaatattgaaaatgagagcaataaaattttgaatgatgatgttgtgtgattgtataaacttattcgtattttagatacgttttgatatttcgcatgatgaggaaatacttttaacaactgatgacatattttaatagtgaatatattttgagatattaatatatttaatgttaaggatgttgtcgcaataaaattaaaatattgaaagataatttttattgattaattgcgaatatacaaagacaccattatatccatatgctaaaataagaaaaaaggcgacatgttatctcaatttacctgcatctagactcctttacataagaaataatcatcgccgagttttaaaattttacaactttgtagatgtaaaaagcatttgattttaaatagtttgaaaatcatatatttttgaaaaaggagcatgccgatgagtattgacatgtatttagacagatctcgaaaccaagcttcaagtgtggggaatttgagtcaaacaatgaattcaaattatgatgcgttggaaaaagcaattactcaatttattaatgatgatgcgcttaaagggaaagcgtatacgtcagctaagcaattttttagtacggtgttaattccattatcaacaagtatgaaaacattgagtgatttaacgaagcaagcttgcgataattttgtgtcacgttatacgagtgaggttgatagcatatctttaaaagaatcagagcttgaagaagatatcagatcattaagtcaacaaattacgcgatatgaaaatttgaataacaatttgaaaaagcatgcttccgataatcagcaagccatttcatcgaaccaacaaataatacgaacattaggtcaacaaaaacatgaattagaagagaagctacgcaaattgcgtgagtttaatcaaaaatcaccagaaatatttaaagaagttgaagaatttcaaaaaattgtccaacaaggacttacccaagcgcagaatttttggaacttttcaacaaatcaatttaatattccttcaggtaaagaacttgattgggccaaagcaagtcatgaaaaatatttgaaagttgctatggggaaaattgaacataaagcagagaaagaaactttaaataaagcagactttgctgttataaaggcatatgccaaagaacatccagaagacgatatcccgaaaagtatattgaaatatataaatgacaataaagacagtattaaaagagatataggattagatattacgtcaacacttttagagcaaggcggtataaatgcaagtaaattcggtgtatttatcaatacagcaggtggagtgaaaggcccagcaggtccaaattcatttgtggaagtcaaacgtacatcaggtaatgtgtttatagaaaatggtagtaaatttgcaaaaggcggaaaatacctaggtaaaggtgttgctggtgtaggatttggtataggtatgtatgatgaccttgcaaatgatgataaaacatttggagaggcgttgtcgcataatggtatgacgcttgcagctggatctgcagggacagcagttggagctggattagcgacttttgttttaggaagtaatccagtaggatgggtgattttagcaggtttggctatgagtacagtatttgcattaggaacagatttaatttatcaaaataatatttttggattaaaagataaagtagactgggtagggcataaaatcgataatagtatagatgttgttaaaaaaactacagaaaaatccatggatagtgttgggaatgctgttagtgaagctaaaaatattattagcaatcatataaatccaatgaaatgggcgtggtgagttttgctttttaatattaaggttattaataaaaatccgagatataaagtcgttcaatataatgatgagtatttgttaattgatttagtaagcacttggcttgtatacttttttccttttattaattggttcattcccaaaaggtatgcaaaacttagtgagaaggaacttgaaaatttaaatgttgataaacaaaataaaaataatattttctggccagttactggtagttcgtttttatttgtagttattttacggaaatatgtacatacgtttgaagttcaattagataataagattttaatatctttatgttttataggatttataggtattgcagcattttacatttacttaaataaaaagcttaaactaaagatatatgatgataatctagataatgaaaatagggttatattagtgcctacttttaaagatggaagttttatagttttcacatatctattattaggaggttgttctatattatttttaatatggctaatgactataaaacctcaaaatctactggtatttattatgtggattattattacaatttttttctttctaataagcatgggctcaattagtaataaaaaggtttatgccaaacttaaaaagcaatagaaattactaaacttagattgtagttcgtaagttaagtaataaacaggaaaatagtatgttactaaaatacaaaacacttataaagtatctgaaagtgtattagatataaaaccaacgagacggaagtggagatattgctttgcgaggttagagttgtaaacaaaaatcccagatatagaattattaaatataaaaacgactatctgatgattgatttagtaagcacctggttagttttgttctttccgtttattaattggttaataccaaaaaaatatgtccaaatcagcagagaagattttgataatttaaatattgtcaaaccagttaaaaataaagctttatggccagctataggtagcatacttttatttggcactatgtttagagataaaatatatatacctgattctcatttagaaaaaaattgcgttattatcatttgttcggttttattattaagtattctagtgttttatatatatttaaatcagaaagtaaagttatctatctataatgatcggagtagcaatggaaaaattatgatttttccatcattcaagaatctttgctttgtactattttcttattttttctgtggtggattatcaatcatgttcttagatgttttgattagtttatctatccaaaatattatagtatttattgcttgggttattatgacaatgctatttttctttataaatatgtcttcaataatagacaaaaagattcatgttatatatttaaggtcatataaatattaattttgatacaaaagggcacaagtgttttgagaaacagaaacgataatatagctgtgtgaatttgttattaataggaagtgataattattgctttgtgaaaccgaaattatcaataaaaatccgaaatacagagttattaagtatgatgatgagtatttaatggtcgatgtaataagaacttggcttgtatacttttttccatttattaatcggttcattccaaaaaggtgcgccaaaattagtagagaagagtatgaaaaactgaacactgttaagccagttaaaaataaaaatttttggcctgttgtaggaggaacaatcctactaggtgctacttccagaaagtacatacacttacttaatattcaattagaaaaaagatcggttatatttatatgcttcgttgtatttctatgtattttaatcttttttgtgcttctgaatcgaaaattaaaattgaaagttttcgataataaaaaagaagaacaaaaaataattttagtaccaacattaaaaaatgcgataaagtccgtataattgtgtaaaagtaaaaaggccatataacagtccttttacggtacaatgtttttaacgacaaaaacatacccaggaggacttttacatgacccaagtacattttacactgaaaagcgaagagattcaaagcattattgaatattctgtaaaggatgacgtttctaaaaatattttaacaacggtatttaatcaactaatggaaaatcaacgaacagaatatattcaagcaaaagaatatgaacgaacagaaaaccgacaaagtcaacgaaatggctattatgagcgcagctttacgacacgtgtaggcacgctagaattaaaagtacccagaacacgtgatggccatttttcacccacagtgtttgaacgttatcaacgaaacgaaaaagccctcatggcttcaatgttggaaatgtatgtatcaggcgtttcaactcgtaaagtatcaaaaattgtggaagaactttgtggtaaatccgtctctaagtccttcgtttctagcttaacagaacagctagaacctatggttaacgagtggcagaatcgtttattatcagaaaaaaattatccttacttaatgaccgatgtactctatataaaagtacgagaagaaaatcgagtactctcaaaaagctgtcatatagcgattggaataaccaaagatggcgaccgtgaaattatcggcttcatgattcaaagtggcgaaagcgaagagacctggacaacattttttgaatacctaaaagaacgcggtttacaaggtacggaactcgttatttctgatgcgcacaaaggattagtctctgccattagaaaatccttcaccaacgtaagttggcaaagatgccaagttcacttcctaagaaatatctttaccaccattcctaaaaaaaattcaaaatctttcagagaagctgttaaaggaatttttaagttcacagatattaacttagcgcgtgaggctaaaaatcgattgattcatgattatatcgatcaaccaaaatattcaaaagcttgcgcatcattggatgatggattcgaagacgcctttcaatataccgtacaaggaaattcccacaatcgactaaagagtaccaatctaattgaacgactgaatcaagaagtacgcagaagagaaaagattattcgcatcttccccaatcaaacatcagccaatcgcttaattggagccgttcttatggacctacatgatgaatggatttattcttcaagaaaatacatcaattttgataagtagaaatggtaaaaacattgtatagcattttacacaggagtctggacttgacttcaatagttttatatatttatttaggtggtggttcattctttactatttatatgttattgacgattgaagttcaaaatataatattatttataactttgtttgtaatatttttgtttttcttatttttaaatatgtgctcactatatgacaataaagttcatgtattatttaaatcaaatggaattgaaaagttttaataggaataataaacaaaggaatggtagtgataaatattgctatgtgaatctaaagttatcaacaaaaatcctaagtatagagttattaaatatggtgatgaatatttaatgattgatttagtaagtacctggttaactttatttcttcctatgattaattggttaattccaaaaaaatatgtcaaaatcagtaaaaaagaatttgacgatttaaacattgtcaaacctgttaaaaataaagctttttggccagttgcaggtagtactattttgttcggagttacgtttagaaaatatattccttcacttaatattcaattagagaaaaacatggtgattgtaatatgttgtgcaatatttctgggtgttttaatactttttttatttctgaatcgtaagctaaggttggaaatttataataataactctagtaaagggaaaataattttatttccttcattaaaaaacttttgtttcacaatattttattattttttatttggcggtctttcaataatggctctaagtatgttattaactttaaatcctcaaaatataataggctttattggttggttggtaatgactgcaggtttctttctgttaaacatgtcatcgattattgacaaaaaaatttatgtattatctaaaactaacacggtggaaaaatgatggtttagctggatttactgcaggttctatttcggcaatacttgtatattggaccaatcaaaaaaatgaatttggaataaaagataaaaacgattggataggacataaactagacgttggtatagatgctgtagaaaaatctgcagaaaaaacagtagatggtgttgaaaatgtcatggtgaagcttcaaaaagtatttctaatcatataagccctaagaaatggagctggtaaatgttgctatgcgaatctaaaatcatcaataaaaacccaaaatatagaattattaaatataatgatgaatacttaatggtcgatataataagcacttggattagtttattttttccttttattaattggttcatcccaaaagaatacgtcaaaattagtagagaagagtttgaaaacttaaatattgttaaacctgctaaaaagaatgttttttggccagttgcaggtagctctgctttgcagggagttgcattaagaaaatatacacatttacttgacattcaacttgataaaaaattagttattgccatatgttgcatcacatttatagggattttaatattttatgtacgcctaattaaaaaatcatctttaaatatttataatactaaaaataaaaggtcaaaaatttttttaatacctacactaaaaaatgtttgtttcacattatttggatatattttatttggcggattgactatgctattcctagatgcactattatcaatgagttatcaaaacataatagtatattttgtttggattgcagttataatgggtttttttctagttaatatagctttaattatagataaaaacattcatgtcatacttaaaaaccaatagaaattaccaaattaaatttgcaatggctttaatattgtcgttcttaaatgtttttcaatttctgattcaaaagtacatgtaatttaaaggtcaacgagcaatcgcgctatatgcatatcaatttaagcaatacttattttaactgagttttatataacgttttcctattacaccgcttaaattcaagctctaattctaacatttggaagttgtattaaatcatgatagtgtgatagtggaaaagttataaagataaggagctgggtctaatgaagcaatttgtaaacttaggtaaatctgatgttgaagtgtttccaatcgcacttgggacgaacgcagtaggtgggcataatttatatccgaacttagatgaagaacaaggaaaagatgttgttcgtcaagccattaatcatggtattaatttattagatacggcatatatttatgggccagaacgatcagaagaattggttggagaagttgttaaagaatatccgcgagagcaaattaaaattgctacgaaagggtctcatgaatttgatgaaaatcaagaagtacatcagaacaatcaaccggaatatttaaaacaacaagttgagaatagtttgaaacgtctacaaactgattatatcgatttatattatattcattttccggataacaacactccgaaagatcaagcagttgcagcattacaagagcttaaggaacaagggaagattaaagcaattggtgtatcaaatttcacattagatcaacttaaagaagcaaataaagatggttacgttgatgttgtacagttagaatataatttattgcatcgcgaaaatgaggcagtattacaatattgtgttgatcaccaaatcacatttattccatatttcccattagcatccggtattttagctggaaaatatgatgagaacactaaatttagtgaccatcgtactacacgtcgtgattttaaaccaggtgtatttgaagaaaatgtgcgtcgcgtaaaagctttggaaagcatagctgcagcacatcaaacttcaattgcgaacattgtattagcattttatttaacgagaccagctatcgatgtgattattcctggtgcaaaacgtgcagaacaagtcgttgaaaatattaaagctgcagatatcgttttatcagatgatgagattcaatatatcgatgaactgtttccgattgaagactaaatgaattgtatttaatggtgatatatgtatctaatttcatcatgaattagccccgtatcacaaacgacgttatataaggcatgacgaaatttcgtcaaatttatataaaagttgtaagcgttttactattcggtaggcaaagcttatgatagtataattaggtaacgaaaaacacagatatttattaatcaaaagtgaggttaggctaaaatgattactgttttgtttggtgggagtagaccaaacggtaatactgcacaattaacaaaattcgctttgcaagatttagagtatcaatggattgacgtgacacaacatcagtttaaaccgatacgtgacgtgagacatacagcagagactattacttcatatgacgatgactatttgccgattctagataaaatattggctagtgatacaattatttttgcatcaccagtgtattggtatagcatttcagcaccattgaaagcatttatcgaacattggtcagaaacattacaagataaacgatatcctaattttaaggcacaaatggccgaaaaggattttagagttattttagttggtggagattgtccaaaaataaaagcgaagccagcaattacgcaaatgaaatatagtttagactttttaggtgccactttaaatggttatattattggaactgctgaaaagcctggtgacatcatgaaagacaactatgccttagcacgtgcaactgagtggaatagtatattgcaataagacatacctcatactaaacgaagtgattttttgcttcgttattttttatttttaattttaacggaaaatataaatatataaattgaatagacaatcattgtttattaagtattgagcaagttgtggtataatgccgttattaaaacttgttaataaggggagaaagtcatgttcaaggtaagacaagcaactgaaaaagatgttgttcaaattagagatgtcgcaactaaagcttggtttaatacatacttaaatatatacgctgcgacaacagttaatcacttgttagaagcttcatataatgaacatcatttaaagaaaagacttcaagaacaattattcttagtcgttgaagaaggtaatgacatcgttggctttgctaactttatttacggtgaagaattatatttatcagctcattatgttaaaccagaatcgcaacatacaggttatggtacagcattgttaaatgaaggattatcacgttttgaagataaatttgaaggtgtttacttagaagtagataataaaaatgaagaagcagtagcttactataaagagcaaggttttacaatcttacgctcttatgagccagaaatgtatggcgaaaagttagacttagcacttatgtacaaagcattttaagtaaattaaatattatattaaacgaaaaggaggggaataatgactaacgcatatgtagatttaaaattagtagaagaaaaagtttttaaagacccgatacatcgatatattcatgttgaagatcaattgatatgggatttaattaaaactaaggaattccaaaggttacgtcgaattagacaactaggaacactgtacctatcttttcacacagcagaacatagtcgctttggacattctttaggtgtgtatgaaatagttagacgattaattgatgagtcatttattggtcatgatgcatgggacaataaagatagaccgttggcattatgtgctgcattattacatgatttaggacatggtccattttcacatagttttgaaaaaatatttaatacagaccatgaagcatacacacaagcgattattactggagatactgaggtgaatgctgtattacgtaaagtggcgcctgagtttccaagagaagttgcggaagtaattaataaaacgcatcataataaattggtcatttcgatgatttcgtcacaaatcgatgcggatagaatggattatttacaacgtgatgcgtatttcacaggtgtatcatatggtgcttttgatatggagcgtattttaagattaatgcgaccttctaaagatgaagtactaatcaaagaaagtggtatgcatgcagttgaaaactttattatgagtcgttatcaaatgtattggcaaatttacttccacccagttagtcgtggtggagaagtgctgcttaataattgtttgaaacgcgcaaaacagctttataatgaaggctatgaatttaagttgcatccacatgattttattccattttttgaagagacagttacgattgaacaatatgttgaactcgatgaagcggtagttacgtattatttggaaaaatggacaaaagaagatgatgctattttaagtgatttagcaagtcgatttattaatcgagacttatttaaatatattccatttgatggctcaattattacaatatcagaactgcaagaactgtttgaagcaggtggtattaatccagattattattttgtgagtgaagcattttctgatttgccatatgactatgatcgaccggggtcaaatcgcaaaccgattcatttattaagacaagatggtacgattagagaaataagcaatcaatcattagtcattcatagtattacaggcattaatcgccaagactataaattatattatcctagagaaatggttgcaaagattaaagataagacaattagagaagctattgaaaatttgattaatgagcttaattaaacagggctaaaattgttatcgttaaatatggaggttatatcattgtctgagaaaaaaggctttaattttaatatcataaaaaatgaccctctagatggtcataaaggtacaaatattggttcaattagcttagacaatattgcaccagtttttatcgatgttgctaacaaagaagcatttattgatattggaggcatgcatgctcgtgccaaagttgaaaaaggtgtgaaatggattactgataaagctgctgttgaaggcgatgaagctaaagaatattggttgtgttgggtaacaacagaacgtaatgaacaaggaccatattacgctggtttaacagcgtgctatttattagtgaataaagcaattcgtcgtggttataaaagtatgcctgaacatgttaatatgatggataaatcaatgaaacatcatattatcatagatcaaattggtgacgagaataaagctattttaaaagactttttaatgaaccatgatgaaggtatgtggaagcattcttctgatgctttacatcaagcatttaattaaatattagaaactaaaatttcccaattaatctataaagatatgattcatttctcaatgacgacgtaaatcgtgaggtgaaaataatgtcttagattgattgggagtttttttaatttttttgaaattaaattaatctgtagttaataaaaaatttgaataactgacacatttttttgatcatagctatatactttgtgaattaattcacattataataagagtgaagataagagtattataaattatctttaaataaatatatgtgaagtaaaaattacacgttagcatatcgattatgtcatttcttttaacatattaactagggaaacgttaaaagttaacggttgatatctaactaaaaacaaggtcacagtagtatgttttaatctggcgtctattacaaataaaaattacatctataattattcgttttcttttttgaaagtaatagccaattaatatcatacatactggagtgactataaggaggacattattatgagagcagcagttgtaacgaaagatcacaaagtaagtattgaggacaaaaagttaagagctttaaaacctggtgaagcgttggtacaaacggaatattgtggcgtttgtcataccgatttacatgttaagaatgctgattttggtgatgttacaggcgttactttaggtcatgaaggtattggtaaagtcatcgaagttgcggaagatgtagaatcattaaaaattggagaccgtgtgtctatcgcttggatgttcgaaagctgtggaagatgtgaatattgtacaacaggtcgtgaaacactttgccgtagtgtgaaaaatgctggttatacagtagatggtgcaatggctgaacaagttattgttactgcagactatgctgtgaaagtacctgaaaaattagatccagcagcagcgtcttctattacatgcgcaggtgtgacaacttataaagctgtaaaagtaagtaatgtaaaacctggacaatggttaggtgtttttggtataggtggtttaggtaacctagctttacaatatgctaaaaacgttatgggggctaaaattgttgccttcgacatcaatgatgataaattagcattcgcgaaagaattaggtgctgatgctattattaattctaaagatgttgatccagttgcagaagttatgaaattaactgataacaaaggattagatgcaacagtggtaacttcagttgctaagacgccatttaaccaagcggttgatgttgtaaaagctggtgcaagagttgttgccgttggtttacctgttgataaaatgaacttagatatcccaagattagtgcttgatggtattgaagtagtaggttcacttgttggtacaagacaagacttacgtgaagcgtttgaatttgctgctgaaaataaagtaacacctaaagttcaattaagaaaattagaagaaatcaatgatatttttgaagaaatggaaaatggtactataactggtagaatggttattaaattttaaaaatatcaactgactatatagataaagaaggtagtgctctgaacactatcattataatcaaacacgaggttttcatgaaagatagtgaaaatctcgtgttttttggttttgaggtgttgtttgtattttataaaatggtttacatatatgaagcgttgattaagtatggaattgttaattaattgaacctatttagctttaagaaggcataacaagatgaccttattttatgctataatatttctattatgcgaagattaaggtgagtagtaaattggataaaaaagtaagtattcaaacaaagcaagtgttgaaacagcacaacgaaaaagaaaaatttgaatttactactgaaggaacttggcaacaaaggcaatctaactttattcggtatgtagaacaaattgaggatgcaacagttaatgttacaataaaagtggatgatgatagcgttaagttgattcgtaaaggcgacattaatatgaatttgcattttgttgaaggacaaacgacaacaactttttacgatatatcggctggacgaattccactagaagttaaaacattacgcattttacatttcgtaagtggagacggtggcaagctaaagattcattatgaattatatcaagataatgaaaaaatgggttcttatcaatatgaaattaactataaggagataggcgaatgaatattattgatcaagtgaaacaaacattagtagaagaaattgcagcaagtattaacaaagcaggattagcagatgagattcctgatattaaaattgaagttcctaaagatacaaaaaatggagattatgctactaatattgcgatggtactgactaagattgcaaagcgtaatcctcgtgaaattgctcaagcgattgttgataacttagatactgaaaaagcacatgtaaaacaaattgacattgctggtccaggattcattaatttttacttagataatcagtatttaacagcaattattcctgaagcaattgaaaaaggtgatcaatttggacatgtaaatgaatcaaaaggtcaaaatgtattgcttgagtatgtttcagctaaccctacaggagatttacatattggtcatgctagaaatgcagcagttggtgatgctttagctaatattttaactgcagctggctataatgtaacacgtgaatattatattaatgatgctggtaatcaaattactaacttagcgcgttcgattgaaacacgtttctttgaagctttaggtgacaatagttattcaatgccagaagatggctataatggaaaagatattattgaaataggtaaagatttagcagagaaacaccctgaaattaaagattattctgaagaagcacgtttgaaagaatttagaaaattaggcgtagaatacgaaatggctaaattgaaaaatgatttagcagagttcaatacgcattttgataattggtttagtgaaacatctttatatgaaaaaggagaaattcttgaagttttagcaaaaatgaaagaattaggttatacgtatgaagctgatggcgctacatggttacgtacaactgattttaaagacgacaaagacagagtattaattaaaaatgacggtacatatacgtatttcttaccagatattgcgtaccacttcgataaagtaaaacgtggtaatgacattttaatcgatttatttggtgctgatcatcatggttatattaatcgtttgaaagcatctcttgaaacgtttggtgtagatagtaatcgtttagaaattcaaatcatgcaaatggttcgtttaatggaaaatggtaaagaagtgaagatgagtaaacgtactggtaatgcgattacattaagagaaattatggacgaagttggcgttgacgctgcacgttatttcttaactatgcgtagtcctgatagtcactttgattttgatatggaattagcgaaagagcaatctcaagacaatccagtttactatgctcaatatgcacatgcgcgtatttgttcaattttaaaacaagcgaaagagcaaggtattgaagtgactgctgcgaatgattttacaacgattactaatgaaaaagcgattgaattgttgaaaaaagtagctgatttcgaacctacaattgaaagtgctgctgagcatagatcggcacatagaattactaattatattcaagatttagcttctcatttccataaattctataatgctgaaaaagtgttaacagatgatattgaaaaaacaaaagcacatgttgctatgattgaagcggtcagaattacattgaaaaatgcattggcaatggtcggtgtaagcgcacctgaatcaatgtaagaacatttatatacactccaacgtagagtttctcgaaagatactttgtgttggagtgttttttttaggtatgtgacatattggggaatgcttagtatgtgaataaggttaagaggaacacagttggatgctctgcacaactgcataagagagcctgagacataaatcaatgttctatgctctacaaagttataatggcagtagttgactgaacgaaaattcgcttgtaacaaacttttttcaattctagtcaaccttgccggcggggccccaacaaagagaaattggattcccaatttctacagacaatgcaagttggggtgggacgacgaaataaattttacgataatatcatttctgtcccactccctctaaaatggagggtgtaaatgttaggaactgatgaattatataaagttttatatgaacatctcggaccacaattttggtggcctgctgataatgacattgaaatgatgttaggtgcaattttagttcaaaatactagatggcgaaatgcagaaattgcattgaatcagattaaagaacatacgcattttaatccaaatcatatattagaactacctattgaaacgttacaatcattgatacattcaagtggcttttataaaagtaaatcactgacgattaaaacattattaacatggttagcacgacatcatttcaattatcaagagattaatgagcgatataaaggtggattaagaaaagaattattatctttgaaaggtattggaagtgaaacagcagatgtcttacttgtttatatattcggacgtattgaatttattccagatagctatacaagaaaaatatatgataaattaggatatgaaaacactaaaaattatgatcaattaaaaaaagtagtcacattaccaaatcattttacaaatcaagatgctaatgaatttcatgctctgttagatgtatttggtaaacattactttagagacaaagatataaagaattatgattttttagaaccttactttaaaaagtaaacgctgtgaagttagatagatgagtttatatgaaatataaaaaataatttactattttcttttagtatgtggacttatataataaatagaagcatataaagaaaaaaacagttgtttgtttgtgcagcaactgcataagagcccctaatcgctaaagctcaaggggagtaaaggaatacagttgtttgtgcagcaactgcataaaagcctctaatcactaaaggtgaagaggaacgcagttggatgctaaggcacaactgcataaaagcctctaatcgctaaagatgaagaggaacgcagttggatgctaccgcacaactgcataaatccctctaatcgctaaagcgaaaagtgggattaaaaaggagatgtgatagtgtgaagaaatcgttaattgcttttattttgatttttatgcttgtcctgagtggctgtggtatgaaagataatgataaacaaggtagcaatgataatggctcgtctaaatcgccgtaccatagaattgtttcgttaatgcctagtaatactgaaattttatatgaattaggattaggtaaatacatagttggtgtttcaacggttgatgattatccaaaagatgtgaaaaagggtaagaaacaatttgatgctttgaatctaaataaagaggaacttttaaaggcaaagccagatctaattcttgcgcatgagtcgcaaaaggcaactgctaataaagtattgtcatcattagagaaacaaggcatcaaagtagtgtatgttaaagatgcacaatcaattgatgaaacttacaacacatttaagcaaattgggaaattaacgcatcatgataagcaggctgaacaacttgttgaggaaactaaagataatatcgataaagtcatagattcaattcctgctcatcataaaaaatcaaaagtatttattgaggtttcatcaaagcctgaaatatatacagcagggaagcatacattttttaatgatatgttagaaaaattagaagcccaaaatgtgtatagtgacattaatggttggaaccctgtaacgaaggaaagtattattaaaaagaacccagatatattaatttcgacggaagctaagacaagatcagattatatggatatcatcaaaaaaagaggtggattcaataaaattaatgctgtcaagaatacacgtattgaagttgtaaatggtgatgaagtatcaagaccaggtccacgtattgatgaaggattaaaagaattaagagatgcaatttatagaaaataaaccattctaattatgccccttattgctacatgtaaaaaatacatgtttgagataaggggtttttaaaatatatttagtgaatgatagcaacgcgagtatgtgattgctataatgaatgtaattatcgatgaaagaaaagagaatgctatgacatttaataaagtattattgagctggatagtcatattgattataacaactagcatatatctattttggcagttgggcgatatcaatgatgtatttaaccagtctattttaatcaatgttagattaccgagattattagaagcattgttgacaggtatgatattaactgttgcaggccttatatttcaaacagttttaaataatgcattggcagatagctttacattaggattggcaagcggcgctacatttggttcaggattagcattatttttaggtttaacaacgttatggattcctgtattttcaataacatttagtttgataacattaataactgtattagtcattacgtcggtattgagccaaggctatccagttagaatcttaatattaagtggtttaatgattggtgcgttattcaattcacttctatattttttgattttattaaaacctcgcaaattaaatacaattgccaattatctgtttggtggttttggtgatgcagaatactcaaatgtatctataatagcaatcacatttatcattgcattgtttggtatatttatcattcttaatcaactaaagttattgcaattaggagaactaaaaagtcagtcactaggcttaaatgttcaattgattacatatatcgcgttatgtatagcttctatgataacggcgataaatgtcgcatatgttggcatcattggattcattggtatggtgataccgcaactcattagaaaatggcagtggaaacaatcattaggaagacaattggctttaaatattgtaactggaggacaaataatggttatggcagattttattggtagccatatattgtcaccagtacaaataccggcaagtattatcattgcattaattggtataccagtgttattttacatgctaatatctcagtcgaaacggttacactagcacacgacatttgctaaaataaaaataactataaacataaagagggcataagcgatggatttgaatcaaattaaagcagttgtatttgatttagaaggtacgttgttggacagagttaaatctcgagagaaatttatcgaagagcaatatgaacgatttcatgactacttaattcatgttcaactggcagattttaaaaaagcatttattgagctagatgacgatgaagataatgataaacctgatttatataaagaaatcattaaacgtttccatgtagataggttaacttggaaagacttatttaatgattttgaaatgcatttttatcgttatgtatttccttattacgatactttgtatacactagaaaagctatcgcaaaaaggctttcaaattggtgttatcgcaaatggtaaatctaagattaaacaatttcgattacattcacttggtttgatgcatgttattaattatttatcaacatcagaaacagttggttttcgtaaaccacatcctaaaatttttgaagatatgattgatcaactaggggtattacctgagcaaattatgtatgttggcgatgatgcgttaaatgatgtagctccagcacgagctatgggcatggttagtgtatggtataaacaagaagatgctgaaattgaaccactcgaagaagaagttgattttacaattacaacagtggaagaattattaaccattttaccaataaaaaatgataataaaggagaaaattatggatctatttactagaaaagatggaacatcgatacattacagtacattaggtgaaggctatcctatcgtattgattcatactgtacttgataattattctgtgtttaataaattagcagcagaattagcaaaatcatttcaagttgtgttaattgatttacgtggacatggctattctgataaacctcgtcacattgaaataaaagatttttctgatgacattgttgaattacttaaatatttatatattgaagaagttgcatttgtatgccatgaaatgagtggaatcattggtgcggatatttcagtacgttatcctgaatttacatcatcacttacgttggtaaatccaacatctattgaaggtgaattaccggaagaacgtttatttagaaaatatgcccatattattcgaaactgggatcctgaaaaacaagataaatttttaaataagcgtaagtattatcgtccgagaaaaatgaatcgattcctcaaacatgtcgtagatacaaatgaaatatcaactaaagaagaaattcaagcagttaaagaggtattcaaaaacgctgatatttctcaaacttatagaaatgtcgtagtaccgacaaaaattattgcaggagaattcggtgaaagaacaacaagattagaagctaaagaagtagctgatttaatccaaaatgcggactttgaagtatatcaagaatcaagtgcattcccatttgttgaagagcaagaaagattcgtcgaagatacagctgcatttatcaacaaacatcacgatgaaaagcatgtttaatttttagtgataagtgaaatataaaagtagtaattattatttgtaatataattgtaatatgactgttgttttagaaatgattgttgtataatggttgtgagcacaagacgatataaataaaaggagagagtgcttatgaaaaagctactaacggcaagtataattgcatgttctgttgtaatgggagtaggcttagtgaacactagtgccgaagcagcaagtggcaactctattgatactgttaaacaattaattaagggtgatcagtcattagaaaatgtgaaaattggcgaatctattaaagatgttttaactaagtacaaaaatccgatgtattcttacaatgaagatggaactgaacattattacgaattccatactaaaaaaggtatgttattagtaactactgatggtaagaaaaacaatggtaaagtaactcatatttcaatgatgtataatgatgctaatggtccaacatatcaagctgttaaaaattatgttggcaaagcagtaacacatacggaatatagcaaagttgctggtaattttggatatattgaaaaaggcaaaacgacttatcaatttgcctcagcaccaaaagataaaaacataaaattatatcgtattgatttggaaaaataataattaaattaatcgtgcttaaccgacaagttaaatcgcaatacttgtcggttattttattacatggcataatacagtgaatattaatttttatgatttgcgaaggggaaattaaaccaatacaataaataaagatgtttcattttaaaggagtactaccaatgcgtattaacgataaaattttactagaaaatatagaagattactttaatcataaaggtttatcaccgcatttgattgatgatattaaagagaaagtaattactgatataaaaaattctgaaaagaaagatcaagattatattgaatataaaagaaaatctccagcacaaatcatattaatgattcaaaggaatttgtttgctttacaaatgaatccagttattttctttattataaacttcattctcatatcctatttatatgataaacagtatgttcagtttcaagctattactggaatgagtctattttattgtttagtgatttttccaatgactattgttgtatacctaagggtgtctcaaaagaattacttgcgtagtaataaaatagaaatgattatgggtacaattatcgctatcatatccttgttattaattatattacaagcatttaatattacttggggcgttataccaattacaaattttggacatcaatttttctttttcattggtattattttagtaattgccggcatattttataagcgacttgagttttcgggaatcgggttattattttgtcaaaaaaccgtcgatgcaatgattcataatccacaatcagcccagattttttcattaattatatggatattattagtagttctagttatatatttcacaattagattatcttcacgtacaagattataaatatgataaaactattcacttgattaattgtattaattgagatgaatagtttttttattgttggaataacttttggtaatttataaataatttaaaaaaattgtttataaaatggaagcgtatatagaatgaaggttgggtatatagtttattgagggaggtgtcacaatgaataaagtcacaattaatcctcaaatccaattaacttatcaaattgaaggtaaaggggatcctataatattacttcatggattggatggtaatttagctggatttgaagatttgcaacatcaactagcatcatcatataaagtacttacttacgatttaagaggtcatggcaagtcttctaaaagtgaatcatacgatttaaacgatcacgttgaggatttaaaaattctaatggagaagttaaatattcatgaggcacatattctaggacatgatttaggtggggtagttgctaagttatttacagataaatatgcttatcgtgtaaaatcattaactaccattgcatcgaagaaagatgacttaatacacagctttactcaattgttaatacaatatcaagatgatatagcgggttttaataagtctgaagcgtatattcttttattttctaaattgtttagaaatcaagagaagacgatgaaatggtatcaaaaacaaagaatatatagcattaagtctgaggatgatagtgcggtggcaattcgttcattaattttgcataaagatgaacctatgtatttaaaaaaacgtacatgtgtacctactttgttaattaatggggaacatgatcctttgattaaagataagaatcattttaaattggaagcgcattttttaaatgttacgaaaaaaatcttcgaacattcaggacatgcaccgcatattgaagaaccagaagcatttatgaattattatttaaaatttttaaaaagcgtatcataatatgtgatatataaacctagggcataaagtccttaggcaatgtgaaaaagctgattactattcattatttgatagaaatcagctttttttgaaatgtatttgatatatactgctcgttatgcggctatcttccttatattaagtgccattagtgcaaaacctcttaacaattaggtaaaaagagcataaaaaaaggaagtttaatagaatgtatcatctatcaaacttcaccaaattgcgctaaacaaaattatagttcaatttcgttgtttgcttcagtgattcgtttatttactcgactcaataatgattcgatttttttacgttgttgtgcattaacaagaattaatacagttctttcatcatgctcattacgttttttatcgaagtaatcttcttgagataaaattttaactgctttaacaacttgtggttgtttgtagtttaaatgattaataatatctttaagatagtattctttctctttgttttcgctgatgtatgtcaatacagcgaattcttcaaagctaattgaaaattcctttttaattaaactttttaatttgtcagcataagtgaccattgataacaactcaaagcaatcattgatttttgtaattgccatgtttaaaacctccctatttgatgcatcttgctcgatacatttgcccgataatatattgatatctaatctttatttattatagatatgttagtcataattttgcattaaataagttttattaaatatatttaatgctctattatttagttaattataactaattaaaaatgagaagtaaacaaaaaagtgtttataaaacaaattattcattagacacagtgattgtatttctgggttagcatttggtttagtcaaaaatatcagcattttttataatttaccttaatttaatcgacaatacaaggtaatttatttaatgaaacgatttagcgcaattaaatgtttcgatattcaatgtgtgtctaaagagattctttgttatagcttaactcttccaagttaacttcttctactatttatacccatttttcagaattttatcactaaaaatgaaaaatttttataatttttttaatttagtaattctcagtgcagttttaatgataagaaaaacacattaatttagtgattaaaaccaatctatagcacgttaaagtgtctatacgttattccgattgataacgggtaacaaataatagaaagtacgataattgatcatgcattaaagcacttttatttttcaaactcgactcaatgaattataaaaagttgtgcattttgacttatttttaattaattgaataaccaactatgaaatattagcacgaataacataatttttgctattaatttggtgtaaattattaaaaaataacattaatttaggtcttaagaatgagttgactatcgaatttgctaaattaaaatttgttgtgtcaaagcatactacccaaatcaacgcttttctaaagatttttagaccacaaaaaaatagcttatcacttttaaaaataattacaagttaaaatgataagctaaaagttaatttaaaataatcttaaaagtataatgcctgtcaaaatacataatagaccaatagtttttctggatgtcattgctattttaggtgaaccaaataatccaaagtgatctatcaatatgcccattagaatctggccaaacatcccaataagtgttgttaatgctgcacccatatgaggcattaagataatgttagctgttacaaaagccatgccaagtataccgccagtaaaatagataggctttaatttaccgaattttaaatgacttgtttttagttttaaagaacgattaaaaatagcggttaaaatcaatagcgctattgacccaattgtaaatgatactaatgatgcaaaggctggtgaatgagtatgactagctaaagcactattaattgtcgtttgaataggtggaaagaaaccaaaaataaatcctaatagaagccaaaacagtaaatacttttgatcagttagtaataaattattcttgttaaattgattcattatgacgatgccgacaatgagtaacaatactccaattgctttaattaaattaaaatcatgaattgtagcgccaaataatccaaatgtatcaataatgacacccataataatttgacccgcaactgttgcaattacagttaatgttgcacctaattttggcaataacaataaattgccagttaaaaagctaaccccaagcaaaccaccgactacccatgtgtagttaaatgattgattattgtaaaagtgaatagtaaatacttctggattgataatgatatttaaaataattaaacaaattgttccaactgaaaatgaaatgaatgaagtatagaaaggcgatttagtatacagtgatagtcttgaattgacagatgtttggataggaataagcattccaactaggacaccaatgatatagaaaagaagcatatgaataaagtctcactttccaaagttaataataaaatcatatatttacattatcattatagagaaaatatacaactcatttacaataatgttgaaaaaaacaggacattattacaacaaaatcaccctagacaatcatgatgaaagtctagggtgttagtatttatactaaattaattgcgctttctttatatctatttcttatcttcaaataaaacagttgttgttttatcaataatttgagcagaatgtactttggtgatagtaccactatttgactttataatatttaaatctactaatgcattcatactatcacgtgcaacttgctcggtcactacgttgtttaattgtggtaattgcagttttacaggcttgtctagtgaagatttaaaacttaattcaagtgttttagtcatgaatatgtcctcctgattaaattgataaagatttgatgagttcgatattgctatatgtttctccagtaagtcgctcaataagtttgctgaatgttttaatttggtcgtttgatgcatcagggttaatgttagcgaatcgacgcttaaattctgtttgtttgccgttagcgtctactttagtaaatgataatacaatagtgatgtggtttattttactcatattttaaaacctcctttcacactatatatcgaaacaaaataataaaatggctaattttattttctatgtttaaaatctataaaaaaggcaatagatatatgtaactaaaatataatatagctatgattaagacacttaaagcaaggggaggttgagtaatgaataaagtagaagcgattaaatttaatgatgatattgttaaaatgtatgaagcgctcaagataaaatctgaacgtgactatttattctttaagttagctatacatagtggattgaaagtatcagaattattaacaattacagtctctcaagttaagagactaattgaaaagtgtacgttatcagaaatgtgtaaagcacattttcattcgttgattaaaattaggttaccagaaacattatcgaaagaactacttcaatatatagaggacaggagtctttcgaatgaagacgttctttttcaatcactacgaacaaatcaagtattatctagacagcaagcatatcgaataattcaccaagcatcaattgaagctggtatagataatgtaggactaacgacattgcgtaagacatttgcatatcatgcttatcaaaaaggtatacctataccagtcattcaaaagtatttagggcatcaatctgctattgaaacactaaattttatcggtttagaaaatgagtgtgaacatagtatttatatttcattacaattatagaaacaaaggaggctaataatgagtttggtttatttattaattgctatacttgtgattatggcgatgatacttctaatgtctaaacgtagagcattggctaaatatgccgggtacatagcgttggttgcacctgtaatttcatctatctattttttgattcaaataccatcagtagctaaactgcaatatctttctacctctattccatggattaagacattagatattaatttagatttacgtttagatggtttaagtttaatgttttctcttattatttcacttattggaattgcagtattcttctatgcaactcaatatttatcctctcgaaaagacaatttaccaaggttttatttttatttaacgttatttatgttcagtatgattggtattgtattatcagacaatacgatattgatgtacattttttgggaattaacgagtgtatcatcatttttattgatttcatattggtataacaatggtgacagtcaatttggtgcgattcaatcatttatgattacagtatttggtggattggcgttattagttggttttattatgctgtatatcatgacaggaacgaataacatcacagagatattaggacaagcagatcatattaagaatcatggattgtttatccctatgatttttatgtttttattaggtgcatttacaaaatcagcacaatttccatttcatatttggctacctagagcaatggctgcacctacacctgtaagtgcttatttacattcagccacgatggtaaaagctggtatctttttattacttcgatttacaccattattaggtcttagcaatatgtacgtatatatcgttacgtttgttggtttaataacaatgttatttggttcaattacagctttaaaacaatgggatttaaaaggtatcctagcgtactctacaatcagtcaacttgggatgattatggctatggtgggtataggtggcggatatgctcaacaccaacaagacgcaatagcatctatttatgtatttgtattatttggtgcgctatttcatctaatgaatcatgccatctttaaatgtgcgcttttcatgggagtaggtattttagatcatgaagcaggttcaagggatatacgaattttaagtggaatgcgtcaactatttcctaaaatgaatctagtcatgacgatagcggctctatctatggctggagtaccatttttaaatggatttttaagtaaagaaatgtttttagatgcattaacacaaactggacaattatcccaatttagtttgatttcaatgatagctatcgtgtttgttggtgttattgcgagtgtttttacattcacatatgcactatacatggtaaaagaagtattttggacaaaatatgattctaaggtttttactaaaaaaaatatccacgaaccatggttgtttagtttaccatctcttatattaatggtgctagtacctgtaatcttttttgtaccaaatatatttgggaaggggattatcgttctagcattaagagctgtatcaggtggtaatcatcaaattgatcaattggcaccacatgtttcgcaatggcatggatttaacataccgcttcttttaaccatcatcattattttattgggtagtgtactagcaatcaaagtagattggaaaaaagtgttcacaggtaaaattagacagatttcagtttcaaaaagctatgagatggtatatcgacattttgaaaagtttgctacgaagcgatttaaacgtgttatgcaagatcgtttaaaccaatacattattatgaccttaggcatatttatgattatcattggatatggttatattcgaattggacttcctaaagtacatcagttacatgtttctgaatttggggcattagaaattatattagcaatcgtaactgtcacaattggtatttctttaatttttatacgtcaacgactgacaatggtcattttaaatggagtcatcggatttgttgtgaccttattctttatagcaatgaaagcccctgatctagcattgactcagctagtagttgaaacaataacgacgatactatttattgtcagtttttcaagattaccaaacgtgccaagatctaacgctaacaaaaaaagagaaataattaaaatttctgtatcactcttgatggcacttattgttgtatcattaatttttattacacaacaaacagatggtttatcatcaatatcagacttttatttaaaagctgacaaactaacaggtggtaaaaatattgtaaatgcgatacttggtgactttagagcattagatacattatttgaaggattagtgttaattattactgggctaggtatttacacattattaaattatcaagatcggaggggacaagatgaaagagaatgatgtcgtgttaagaacggtcacgaaacttgttgtatttattttattgactttcggattctatgtcttcttcgcaggtcataataatcctggtggtgggtttattggtggtttaatatttagttcagcgtttattttaatgtttctggcttttaatgttgaagaggttttagaaagtttaccgattgattttagaattttaatgattattggagcattggtatcatctattactgcgataatacctatgttttttggaaaaccatttttgtctcaatatgaaacaacttggatacttccaattttaggacaaattcatgtaagtacaataacactttttgaattaggtattttattctcagttgttggtgttattgtcacagtgatgttgtcgcttagcggaggtcgatcatgaatttaatattattactagttataggatttttagtgtttataggaacatatatgattttatcaatcaatttaattcgtattgtaatcggaatttcaatatatactcatgctggtaatctcattattatgagtatgggaacgtatggttctagtagatcagaaccactaataactggtggaaaccaattgtttgttgatcccttgttacaagctattgtactaactgcaatagttatagggtttgggatgactgcgtttttacttgtacttgtttatagaacttataaagtaacaaaagaagatgaaattgaaggcctaaggggggaagatgatgctaagtaacttattgattttaccaatgttattaccattcctttgtgccttaatccttgtatttttaaaaaataatgatcgtatttctaaatatttatacttaggtacaatgactatcaccacaattatttcattaatgctattaatttatgttcagcgtcaccgtccaattacgctagactttggaggatggtcagcgccctttggtatacagtttttaggagattctttaagtttaattatggttacaaccgcttcgtttgtgattactttaattatggcatacggatttgggcgtggcgaacataaagcaaatcgttatcacttgccatcgttcatattatttttaagtgttggcgtgataggctcttttctaacatcagatttatttaatttatacgtcatgtttgaaattatgttactagcgtcatttgtactcattacacttggacaatctgtagaacaattacgtgctgcaattatttatgttgtcttgaatattattggttcatggctattcttattaggtataggtttactttataaaacagtaggtacattaaacttttcacatattgcaatgcgtttgaatgacatgggagataatcgcactgttacaatgatttcattaatcttcttagtcgcatttagtgcgaaagcagcgctggtcctttttatgtggctacccaaagcctacgctgtgttaaatactgagcttgcagcattatttgcagcgttaatgaccaaagtaggggcctatgcattaattcgattcttcactttactatttgatcaacataatgatctcatacatccattgctagcaactatggctgctataactatggtcatcggcgctataggtgtcattgcttataaagatattaaaaagattgcagcttaccaagtcataatctcaataggatttatcattttaggtttaggaacaaacacgtttgcaggtattaatggtgcaatattttatttggtaaatgacattgttgtaaaaacattgctattttttattattggtagtttagtttacattacaggctatcgacaatatcaatatttgaatggcttagctaaaaaagaacctttatttggagttgcgtttattataatgatttttgctattggcggcgtgcctccatttagtggctttccggggaaagtacttattttccaaggtgcattgcaaaatggcaattatattggactagcgttaatgattattactagtctaattgcaatgtacagtttatttaggatacttttttatatgtattttggagataaagatggggaggaagttaattttaagaaaatcccgctatatcgaaaaagaattttaagtattttagtagttgtggttatcgcaatcggaattgctgcacctgttgtgttaaatgttacaagtgatgcaactgagttgaacacgagtgatcaattatatcaaaaacttgtaaatccgcatttgaaaggagaggactaaatgaatcaaatagttttaaatattatcattgcattcttatgggtattatttcaagatgaagatcattttaaattctcgactttcttttctggatatctaattggtttaattgtcatttatatattacacaggtttttcagcgatgatttttatgttagaaaaatatgggtagctattaaatttttaggtgtttatttatatcaattaataacatctagcattagcacgattaattatattctttttaaaacaaaagatatgaaccctggattactttcatatgaaacaagactaacaagtgattggtcaataacatttttaacaattttaattattataactccagggtctacagtaatacgaatttctcaagactctaaaaagttttttattcatagtatcgacgtgtcagaaaaagaaaaagatagtttgttaagaagtattaagcattatgaagacttaatattggaggtgtcgcgatgatacaaacaataacacatattatgattattagttcactcattatttttggaattgcattaatcatctgtttatttagattaatcaagggacctacaacagcagatcgtgtcgttacatttgatacaacaagtgctgtcgtaatgtcaattgtgggtgtgttaagtgtacttatgggcaccgtttctttcttagattcaatcatgctcattgccattatatcttttgtaagttctgtttcaatatcacgctttattggtggggggcatgtgtttaatggaaataacaaaagaaatctttagtcttattgctgctgtgatgttgttgttaggtagttttattgctcttattagtgcaataggtatcgtgaaattccaagatgttttcttaagaagtcacgctgcgacaaaaagttcaactttatccgtgttattaactttaatcggtgtattaatttattttattgtgaatacaggatttttcagtgtgcgtttattactgtcacttgtttttattaatttaacttcaccagtcggcatgcacttagtcgctcgcgctgcttatcgcaacggcgcttatatgtatcgaaaaaatgatgctcacacacatgcatcaatattattaagttcaaatgaacaaaactctacagaagcattacaattacgtgctgaaaaacgagaagagcatcgtaagaaatggtatcaaaacgattgaagtgttggctaaattgttaagcataacaatgcttttgaaaatctgttttcaaaattaatcattaaaagagtactttgaaattggttagtcgattttaaggtgctcattttttgtattataagttaatgttgttatgtgaaagcaagttgtttatttatacaaacaattagtgataaaataaaattaaataattgcaaatttaagtactgcaatcgtagacatatatctatattaaagtgcttttgtggtcgctaactcaatttatcctctaaagtataattacaacgagatgtgatacttaattttcaattaaacaatactttttagagaggtgaaagtttggaaatatttgaaacaattcttatatttatagctgttgtgatactaagttcgtttgtccatactttcatacctaaagtacccctagcatttatacaaattttcttgggcatgttactatttattaccccaatccctgttcaatttaattttgattctgaattgtttatggtaacaatgattgcgcctttgttatttgtagaaggtgttaatgtttctagagtccatttaaggaaatatattaagccagtgatgatgatggcattaggattagtcattactactgtgataggtgtaggtttatttattcattggatttggccagatttacctattggagcagcatttgcaattgctgccattctttgtcctactgatgcagtagcagtgcaagcaatcactaaaggaaaggtcttgccaaaaggagcaatgacaattcttgaaggtgagtcattattgaatgatgctgctggtattatttcatttaaaatagctgttggagtattagttacaggtgctttttcacttgttgatgctgttcagttgtttttaattgcatcaattggtggcgcagtggttggtttacttataggtatggcattagtaaggttccgattaacattgatgcgtcgaggatatgaaaacattaatatgtttacaattattcaattgttaacaccatttgttacgtatttaattgctgaattgtttcacgcatcaggaatcattgcagcagtagttgcaggacttgtacatggtttcgaacgtgacagaattatgcaagtacgtacacaactgcaaatgagttacaatcatacatggaatatactaggttatgttttaaatggctttgttttttcaatattaggatttttagtacctgaagttattattaaaattatcaaaacagaaccgcacaatttaatctttttaataggcatcactattgttgttgctttagctgtctatctatttagatttgtttgggtttatgtcttatatccttatttttatttagccatcagtccattccaaaaaatgatgactaaaaatgatgatgataatccaacgactgagaaaccaccaaagcgaagtttatacgctttaattatgacgttatgtggtgtgcatggaacaatttctttagcaatcgcattaacgttaccgtattttttagcagggcatcatgcttttacgtatagaaacgacttattatttattgcatctggtatggttattattagtttggtagttgcgcaagtattattgccattattaacgaaacctgcacctaaaacagtaattggcaatatgtcgtttaaagttgctagaatttatatattagaacaagttattgattatctaaatcaaaaatctactttcgaaacaagttttaaatatggtaacgtgattaaagaatatcatgataaattagcatttttaaaaactgtagagaaagatgatgaaaactctaaagaattagaacgtctacaaaaaattgcttttaatgtagaaacaaaaacattagagtctttagtagatgaaggacaaataacgaatagtgtacttgaaaactatatgcgttatgctgaaagaacacaggtatatagacaagcatcattaataagaagaatgattgtattattacgaggtgctttattaaaacgaagagtacaaacgagagtgaactccgcatcttcacttagtgttacggataacttaatggaattaaataaaattaataaattagtccattataatgtggttagtcgtttgtctaaggaaacaacaaaagataatacacttgaagttggaatggtttgtgacggttatttaatgcgaattgaaaacttaacaccatcaaatttcttcaactcagcaagtgaagatacgattactaaaattaaattaaatgcattgagagaacaacgtcgcattttacgtgagttgattgatacagatgaagtatcagaaggtacagcgttaaaactaagagaagccatcaattatgatgaaatggttattgtagatagtatgacgtagttcctaattatgctaaaagggattgatgaaaaactgaagggcttttcatcaatcccttttattttaggggaattgaatagatagttttaaactatacgaattattaatatttgagatttaattgaaataagttttaaaaattggaggagatagattaagcgaagtcatttaaaggtgaagttaagtgtattcacaaaaaatagccacactcatatgacatcggatgagtgtggcttaaggatctatggggggaggaaaccatagatgtttactttgataggccagattaaatatcaaagtatgcgattatttatagcttgatgcaaaagtggtatgcctattaaaagttactgcacatagcttttaatattccgttcaaaggaaaggggcatacaattgaacaatctgtaatagtacttttaaccagctatgctaaaagtctagtagggagaacagttgtccaatcacataagaacctctaacttcgttagtacgattaagaaaagctttttagttagtatgtaatacaatttattgacgcgcgtgaatctcttttataagagtgtgtagggaatggcgttgtataaattgtattagaagaacttctaacgcatctctgtggttaaaagagatgaagggaacgacagtttaattaaaactgcataagaacttctagcttttctctttcgttcaaagagaagttctaataccaccatatcgtgcgatcgggaacggtatatatattaataggagggtaatatatatttaacgcacgatatgggactattagccttcgactttgttatgttgatgtgtggcctaaaatattggagataccaatattttaggttgcatcaacatcaattcatcttacttcattaaaacacagcgtgttatttcatgcttccgtgtacagtttcaatatttgatttcatcattttgtagtaagagtcacctttagtgccttctttaccgattgaatctgtgtacacttcaccaaagatatctttcttcgtttcttcagataaactttccattgctttcttatcaacacttgtttctactaataagtgttttaatttgtgctttttaacaaactcaatagcttgtctcatttgttcaggtgtaccttgtttttcagtgttaatttcccaaatataacctggtgtaataccgtattgttttgagaagtacttgaaggcaccttcacttgtaatcatggcacgttgttcttttggaatgtcattaaatttgtctttactgtcattatttaatttttccaattgagcaatgtatttgttaccttgcttttcataatctgctttatgttttttgtcgttatcgataaatgtttgttgaattgtttttacgtatttaataccgttatctaaacttaaccatgcgtgtggatcttgtttatctttgttgccttcttcaccgtttaaatagataggtttaacatcttttgatactgcgataacttttttatcttttaatgatttaccagcctgttctaaggctttttcaaaccaaccgttaccagtctctaaatttaatccgttgtataaaataacgtcagcgtcagttaactttttaatatctttaggtttaacttcatattcatgaggatcttgaccaacaggtacaatactatgaatatcgacgttgtctccaccaacatttttagccatatcatataaaattgaattcgtcgttactacttttaatttgccatttgacttatcactgctttgtttaccaccagtaccacatgcagcaactagaagtaataaggctaataataaaggtactaattttttcatgttaaacttcctcgtttctttctattcgtaaattttgtgaaaaataatgtgatgatataaattacaaacgtacaaagtacgattgtcgcaccactaggaatgttgtaaatatagctgtaataaagtccgacaattgaacttatgacacttattaaacttgctataatcatcattgagtatagttttttactaattaaaaatgctgtagatgcaggtgtaattaataatgcaactacaagaataatacctaccgtttgaatacttgctactgttactaatgagagtaacaacatcacaaagtaatgtaataacgtcgtatttagaccactcattctactaaacgttggatcgaatgtagaaatcattaatggacgatagaaaataatgattagaataaggacgattgaaccaatcacaatagttgttaaaaatgcactatttgtgattgccagtaaattaccaaacagaatatggtacaaatctgtcgtagtgtttattaagctaataataataatccccgaagctaagaaagcggtaaaactaattccaatagcggcgtcaggtttcgttttactactagatgtgatataaccgataaaaatacttgcgatcataccagttataagtgcgcctacaaacattggaataccaaataagaatgatagggcaacaccaggtaatactgcgtgactcattgcatctcccattaatgaaagaccacgtaatacaattaaactaccaactgtaccacaaactatccctacaataattgaagttatcaatgctcgattcaagaattgatatgtaaataaatgttcgacaaactctaacatgttatattgctcctttgactagggtcactacagtcagtgctactcataaatgtttcgtttaagcgagtgacactcatagcctcttcactatcaccaaagtatcgtaatgtttgatttaatagaataatgcgatcaaagtattgctttgcttttgatagatcatggtggatgataagaataagttttccttgttgttttaagttctcgatttttgtcatgattaatttttcgctactaaaatcaattccgacaaacggctcatctagaaaataaacttcactttcggacatcaatgctcttgctactagcacacgttgtaattgtccaccacttaattctgaaatttgtcgatgacgtaaagattctaattctaaatcgcttaataactgtttgagtttatcccttgctgatttattaggtcgtctaaaccatccaatttctttgtagcaacctgataaaatcacttgttccacacttataggaaaatctaaatcaatatgtgctttttgtggaatatatgtaatatgttgcagttgttgttgtataggtttgttatataacaatttagtaccggtagcattaaattcaccaattaaagacttgataagggaagatttaccagcaccattcgggcccatgataccaattatttcgccgcgtactggtatcgataaggaaatgtttttaagtacatgcttattacctaaaaacagatttaaatcttttgtttctaacaaacgtttatacctcctaattaaaagtttaggctaacctaattaattgtataataaactgagaatatttatcatgtcaagtaaattcgtgatataatatagacaatgtatgtgaggtgaaagtatgttaactgaagaaaaagaggactatttaaaggcaatccttacgaataatggcgataaaaactttgtgacaaataaaatcttatctcaatttttaaatattaagcctccatctgtaagtgaaatggtaggacgtcttgaaaaagcaggctatgttgaaacaaaaccatacaaaggtgttagattaacagaggatggtttaacgcatacgcttgatatcattaagagacatcgactattagaattatttttaatagaaatattgaaatataattgggaagaagtacatcaagaagcagaaattttagaacatcgaatttcagatttatttgttgaaaggctggatagcctgttaaatttcccagaaacttgcccgcacggcggtgtgattcctagaaataatgaatataaagagaaatatataacaacgattttgaattatgaacctggtgatatcgttacaatcaaacgtgtgagagataagaccgatttgctaatatatttgtctagtaaagatatttctattggtaatgaagtggaaattgtatcgaaagatgaaatgaataaagtaattatcattaaacgtaatgataatgtaattattgtcagttacgaaaatgcaatgaacatgtttgctgaaaaataaaataaagaagccataaagatatccatgattgaactgataaagacatatggataattgctttaggcttcttttttattagttaatttatcaagtgagtatatttgagtaaaatattcactgcataaagattgaagataatccagattgtactataaatgaagataggtacatgactgagttctttaagtgcactaccatcccactgtggactcggacgctggaaagtcaatttagcaatcgtccaactagattgtagaacttcgcctaataatacacctaaaatatattgataactcattgtgacaagtagttgaatttctactatattttcatcttttaatataaaatacaacatgatagaaattaaagttataacaacaatgggtgagccttttctagatgttaaaattaaaaaataaataaatatcaataaataggtaaatataaagaaactaggtatctgataatggctcgacgctaaacctatcaataacataataggtggcataaaataaccaccaatcgttgtaagccattggcctgctagatgtctagattgtgtaattgcgaatccttgttgtaatgtctgttgtcgctctcgtggacttgttacaatgactaaatcttttgcacggccaccagcgagtttattaaacagtacatgaccaaattcatgtgttaaaacagggatatagtttaaaatgacatctaaatagttcaaaacaggcttatgtctatattgatgaatagcaatataacaagctgcaacaataacgataatgtatatattaagttgaattgtcgtattaaaaaagtttgataaataattcattgttaacctcatataagatattaatttaaagtttgcttatcacttattataaatgatattggcatcaatagcgttagactttagacttaccttagttaaactaattttaatttttgaaaaggtgaatatgtgttaaaataaagcaaaatcatttcgatataaataggatgaatataaatactgttaatattgattacactaacataataatgaaataagataggagattcctgttatgactgttgaagaaagatccaatacagccaaagttgacattttaggggtcgattttgataatacaacaatgttgcaaatggttgaaaatattaaaaccttttttgcaaatcaatcaacgaataatctttttatagtaacagccaaccctgaaatagtgaattacgcgacgacacatcaagcgtatttagagttaataaatcaagcgagctatattgttgctgatgggacaggagtagtcaaagcttcgcatcgtttaaagcaacctctagcgcatcgtatacctggtattgagttgatggatgaatgtttgaaaattgctcatgtaaatcatcaaaaagtatttttgctaggggcaactaatgaagttgtagaagcggcacaatatgcattgcaacaaagatatccaaacatatcgtttgcacatcatcacggttatattgatttagaagatgagacagtagtgaaacgaattaaactgtttaaacctgattacatatttgtaggtatgggattccctaaacaagaagaatggattatgacacatgaaaaccaatttgaatctacagtgatgatgggcgtaggtggttctcttgaagtatttgctggggctaaaaagagagcgccttatatctttagaaaattaaacattgaatggatatatagagcattaatagattggaaacgtattggtagattaaagagtattccaatatttatgtataaaatagccaaagcaaaaagaaaaataaaaaaggcgaaataatcatgatgacaaaaataaaaccgaggaaatccttaaatggagattctcggttttttcggtttatttaataacgaagcgggactcatcgagtttgtttctaaattctttttgttcggctttggatttctttttaaaatcgttaaggaaagcttcatatttaggtaatacatcatcaagttcaccgtaatcttttaactttccgccttcaatccaagcaatcttagtacaaaattgtctcacttgtcctaagttatgactaacgaaaaagatggttttgttttgctctttaaactcgtaaattttatctaaacatttttgtgcaaaagtttggtcacctacagataaagcttcgtcaatgactaagatatctggattaactgtgatattaattgaaaaaccaagttttgcacgcataccacttgaatactttttaactggttgataaataaactcaccaagttcactaaattcaataatcttaggtgtcatcgctttaatttcttttcgcttaaagcccatacataacattttaaattcgatattttcaatccctgtaagttgtccactcaagccagcactaattgcgataacgctgacttcaccattacgatccactttgccaacagtaggcgacaaagaaccgccaatgatattgctcaacgttgatttgccggaaccattgatgccaacaagccctatgacgtcaccttcatatgcttttaaactaatgtcatctaaagcgaaaaatgttttgtttttatgtttgggaatgagcgcatctttcatacgttctttatttgtacgataaatacgatattcttttgttacatttttaatgtttaccgaaacgttcatttgtagaccttccttattcacatttatctagattataatatactactcaacagttgttaaattttaaaacctgttgtaaagtgtatagaagattttgttattatcagagtgggtgttttgacacaaaatgttaatcatcaatgataacaatgatatttaaaaactaaacttatttcaacttacatgattgtatactataatgtatttgtaataaactaatattttaaagaactagacaataattttgatagcatccatgtatagtgatagtatttacaacaattattataatactatttagttaagtagagaaatagttaaacatttgaaagtgtggtttaatggaatgtcagcaataggaacagtttttaaagaacatgtaaagaacttttatttaattcaaagactggctcagtttcaagttaaaattatcaatcatagtaactatttaggtgtggcttgggaattaattaaccctgttatgcaaattatggtttactggatggtttttggattaggaataagaagtaatgcaccaattcatggtgtaccttttgtttattggttattggttggtatcagtatgtggttcttcatcaaccaaggtattttagaaggtactaaagcaattacacaaaagtttaatcaagtatcgaaaatgaacttcccgttatcgataataccgacatatattgtgacaagtagattttatggacatttaggcttacttttacttgtgataattgcatgtatgtttactggtatttatccatcaatacatatcattcaattattgatatatgtaccgttttgttttttcttaactgcctcggtgacgttattaacatcaacactcggtgtgttagttagagatacacaaatgttaatgcaagcaatattaagaatattattttacttttcaccaattttgtggctaccaaagaaccatggtatcagtggtttaattcatgaaatgatgaaatataatccagtttactttattgctgaatcataccgtgcagcaattttatatcacgaatggtatttcatggatcattggaaattaatgttatacaatttcggtattgttgccattttctttgcaattggtgcgtacttacacatgaaatatagagatcaatttgcagacttcttgtaatatatttatatgacgaaaccccgctaaccattaataaatggaagtggggttcatttttgtttataatttaagtaaataacatattaagttggtgtattatgaacgttttaataaagaaattttatcatttggtagttcgaatactttctaaaatgattacgcctcaagtgattgataaaccgcatatcgtatttatgatgacttttccagaagatattaagcctatcatcaaagcattaaataattcgtcgtatcagaaaactgttttaacaacaccaaaacaagcgccttatttatctgaacttagcgacgatgttgatgtgatagaaatgactaatcgaacattggtaaaacaaattaaggctttgaaaagcgcgcagatgattattatcgataattattacctattactaggtggatataataagacttctaatcaacacattgttcaaacgtggcatgcaagtggtgcattaaaaaactttggcttaacagatcatcaagtcgatgtgtctgacaaggcaatggttcagcagtaccgtaaagtttatcaagcgacggatttttacttagtgggttgtgaacaaatgtcacaatgttttaaacagtctttaggtgcaacagaagagcaaatgctgtattttgggcttccgagaattaataaatattacacagctgatagagcaacggttaaggcagagttaaaggataaatatggaattacaaataagttggtattatatgtaccaacatatagagaagataaagcagataatagggctattgataaagcttattttgaaaaatgtttaccaggatatacactgattaataaattacatccatcaattgaagattcagacattgatgacgtatcttcaatcgacacgtctacattaatgctaatgtcagatataattattagcgactatagttcgctgccaatagaagctagcttgttagatattccaactatattttatgtgtatgatgaaggaacatatgatcaggtgagaggcctgaatcaattttacaaagcaataccggatagctacaaagtgtatactgaagaagatttaataatgacgatacaagaaaaagaacatctattaagtccgttatttaaagattggcataagtataatactgataaaagtttacatcagctcacagaatatatagataagatggtgacaaaatgaggtttacgataatcatacctacatgtaataatgaggcaacaattcgacaattgttaatatctattgagagtaaagaacactatagaatcctttgtattgatggtggttctactgatcaaacaattcctatgattgaacggttacaaagagaactcaagcatatttcattaatacaattacaaaatgcttcgatagctacgtgtattaataaaggtttgatggatatcaaaatgacagatccacatgatagtgacgcatttatggtcataaaaccaacatcaatcgtattgccaggtaaattagataggttaactgctgctttcaaaaataatgataatattgatatggtaatagggcagcgagcttacaattaccatggtgaatggaaattgaaaagtgctgatgagtttattaaagacaatcgaatcgttacattaacggaacaaccagatttgttatcaatgatgtcttttgacggaaagttattcagtgctaaatttgctgaattacagtgtgacgaaactttagctaacacatacaatcacgcaatacttgtcaaggcgatgcaaaaagctacggatatacatttagtttcacagatgattgtcggagataacgatatagatacacatgctacaagtaacgatgaagattttaatagatatatcacagaaattatgaaaataagacaacgagtcatggaaatgttactattacctgaacaaaggctattatatagtgatatggttgatcgtattttattcaataattcattaaaatattatatgaacgaacacccagcagtaacgcacacgacaattcaactcgtaaaagactatattatgtctatgcagcattctgattatgtatcgcaaaacatgtttgacattataaatacagttgaatttattggtgagaattgggatagagaaatatacgaattgtggcgacaaacattaattcaagtgggcattaataggccgacttataaaaaattcttgatacaacttaaagggagaaagtttgcacatcgaacaaaatcaatgttaaaacgataacgtgtacattgatgaccataaactgcaatcctatgatgtgacaatatgaggaggataacttaatgaaacgtgtaataacatatggcacatatgacttacttcactatggtcatatcgaattgcttcgtcgtgcaagagagatgggcgattatttaatagtagcattatcaacagatgaatttaatcaaattaaacataaaaaatcttattatgattatgaacaacgaaaaatgatgcttgaatcaatacgctatgtcgatttagtcattccagaaaagggctggggacaaaaagaagacgatgtcgaaaaatttgatgtagatgtttttgttatgggacatgactgggaaggtgaattcgacttcttaaaggataaatgtgaagtcatttatttaaaacgtacagaaggcatttcgacgactaaaatcaaacaagaattatatggtaaagatgctaaataaattatatagaactatcgatactaaacgataaattaacttaggttattataaaataaatataaaacggacaagtttcgcagctttataatgtgcaacttgtccgtttttagtatgttttattttctttttctaaataaacgattgattatcatatgaacaataagtgctaatccagcgacaaggcatgtaccaccaatgatagtgaataatggatgttcttcccacatacttttagcaacagtatttgccttttgaataattggctgatgaacttctacagttggaggtccataatctttattaataaattctcttggatagtccgcgtgtactttaccatcttcgactacaagtttataatcttttttactaaaatcacttggtaaaacatcgtaaagatcattttcaacataatatttcttaccatttatcctttgctcacctttagacaatatttttacatatttatactgatcaaatgagcgttccattaatgcattccccatcatattacgttgcttctcgccaccaaggtttttatagtctcctgcacccatgataacttgattaattctaaatttacctcgtttggtagtaatcgtatggttgtaatttgctgtatcacttgatccagtttttaaaccatctgtacccggcaaactcatttttgcaccttccaatgaaaagttgaatgtgtaatacgtaactgcatgcgttgttggtgctaactgctttgtaaagtctaatattttaggtgtctctttaatcacgtgtaaatctaaaatggcatagtctctagcagtcgttacagtacgttcttggtctttatactttgttggtgcaaatgtacgtaatcttgaattttcagcacccgttggattgacgaaatgtgtatttttcattccgatagctttagctttgttattcattaaatcaacgaaatcgctggtgttttttgaaaccttcttagctaaaattaatgccgcggcattactagaattagatactgtaatttgtaataggtctgcgattgtccatacttgtccaggatatagtttcgtattactcaactcaggtagtgtagacataatatattctttgttcgtcattgtgactgtgtcatcaagtgaaagctgccccttatttacagcttccaatgttaagtacattgtcattaatttagtcatagacgctggattccacttagtatcgatattgtattgatacagtaattgtccagtttgacttacattaacagcactcgtcggttcgtatgcagccgacaaacctgcataaccatattgatttgctgcttgtacaggggttacgtcactgttagtagcttgtgcatatggtgtcataatacttaatgttaaacataaaatgatgataatagatattaaatttttcataaagcgttaatcttcccttttccaattcttaaatattccctaaaagcaatggttattcctacttacggaaatcattgctaattcacttcaccttaattaaattgttgaaaataaagttttctgcagttaatttgaaaaataatgcaaatatattacgtgtgtagctaaaggtgttataatgtttgtacgaagagcaaacttactcaaaagcgattaattttcatgttttaatataaagactttgagaagttattacaaaaaatgcaatagaaatattctatcatataaatgttatgagcggtattttggggcaacactttatttgatttttaaagttttgttgggagaaagtatatgatagaaatgcatgtatctatctaaatgaattaactataaatttcaaacagaagaggtaaaactatgaaacgagaaaatccattgtttttcttatttaaaaaactatcatggccagtgggtcttatcgttgcagctatcactatttcatcactagggagcttaagtggactattagtgccactgtttactggacgaattgtagataaattttccgtgagccatatcaattggaatctaatcgcattatttggtggtatctttgtcatcaatgctttattaagcggattaggtttatatttattaagtaaaattggtgaaaagattatttatgcgatacgctcagttttatgggagcatatcatacaattaaaaatgccattctttgacaaaaatgaaagtggtcaattaatgagtcgattaactgacgatacgaaagtgataaatgaatttatttcacaaaagctacctaacttattaccatcaatcgttacattagttgggtcactaatcatgttatttattttagattggaaaatgacattattaacatttataacgataccgatattcgttttaattatgattcctctaggtcgtattatgcaaaagatatcgacaagtacacaatctgaaattgcaaacttcagtggtttgttagggcgtgtcctaactgaaatgcgtcttgttaaaatatcaaatacagagcgtcttgaattagataatgcacataaaaatttgaatgaaatatataaattaggtttaaaacaggctaaaattgcggcagttgtacaaccaatttcaggtatagttatgttgctaacaattgcaattattttaggttttggtgcattagaaattgcgactggtgcaatcactgcaggtacattaattgcaatgatattttatgttattcagttatctatgcctttaatcaatctttccacgttagttacagattataaaaaggcagtcggtgcaagtagtagaatatacgaaatcatgcaagaacctattgaaccgacagaagctcttgaagattctgaaaatgtattaattgatgacggtgtattgtcatttgaacatgtagactttaaatatgatgtgaagaaaatattagatgatgtgtcgttccaaatcccacaaggtcaagtgagtgcttttgtaggcccttctgggtctggtaaaagtacgatatttaatctgatagaacgtatgtatgaaattgagtcaggtgatattaaatatggccttgaaagtgtctatgatatcccgttatctaagtggcgacgcaaaattggatatgttatgcaatcaaattcgatgatgagtggtacaattagagacaatattttatacggaattaatcgtcatgtttcagatgaagaacttattaattatgctaaattagcgaactgtcatgattttatcatgcaatttgatgaaggatatgacacgcttgtaggtgaacgaggattgaaactgtctggcggacaacgtcaacgtattgatattgctagaagttttgttaaaaatcctgatattttgttacttgatgaagcaacagctaatctcgatagtgaaagtgaattgaaaattcaagaagctttagaaacattgatggaaggtagaacaacgattgtcattgcgcatcgtttgtctacaattaaaaaagccggtcaaattatattcttagacaaaggacaggtaacaggtaaaggtacgcattcagaactgatggcatcacatgcgaagtataaaaactttgtagtgtctcaaaaattaacagattaattttatatatataagtaagcttggagcaaatacacatataccatcgaggaaattaaagtgtggcacattgatggatatagatgttaataaattgcttcaagcttttgtctattttaaatcatttgagaagttacgacataataattcttaaattaatgaaatcgatattttaagaaaaaaatgctcatggtataatacaagttataagcaaacatacatatattaaatactgtagccacgagtcataattcttcgtattttacatagcaatttaactgattttagagtccacggtacagaagtttgatatttcaatgtttctaaatttttaaaaaattaaatcataggtgggtgccaaatgtttttattaatcaacattattggtctaattgtatttcttggtattgcggtattattttcaagagatcgcaaaaatatccaatggcaatcaattgggatcttagttgttttaaacctgtttttagcatggttctttatttattttgattggggtcaaaaagcagtaagaggagcagccaatggtatcgcttgggtagttcagtcagcgcatgctggtacaggttttgcatttgcaagtttgacaaatgttaaaatgatggatatggctgttgcagccttattcccaatattattaatagtgccattatttgatatcttaatgtactttaatattttaccgaaaattattggaggtattggttggttactagctaaagtaacaagacaacctaaattcgagtcattctttgggatagaaatgatgttcttaggaaatactgaagcattagccgtatcaagtgagcaactaaaacgtatgaatgaaatgcgtgtattaacaatcgcaatgatgtcaatgagctctgtatcgggagctattgtaggtgcgtatgtacaaatggtaccaggagaactggtactaacggcaattccactaaatatcgttaacgcgattattgtgtcatgcttgttgaatccagtaagtgttgaagagaaagaagatattatttacagtcttaaaaacaatgaagttgaacgtcaaccattcttctcattccttggagattctgtattagcagcaggtaaattagtattaatcatcatcgcatttgttattagttttgtagcgttagctgatctatttgatcgttttatcaatttgattacaggattgatagcaggatggataggcataaaaggtagtttcggtttaaaccaaattttaggtgtgtttatgtatccatttgcgctattactcggtttaccttatgatgaagcgtggttggtagcacaacaaatggctaagaaaattgttacaaatgaatttgttgttatgggtgaaatttctaaagatattgcatcttatacaccacaccatcgtgcggttattacaacattcttaatttcatttgcaaacttctcaacgattggtatgattatcggtacattgaaaggcattgttgataaaaagacatcagactttgtatctaaatatgtacctatgatgctattatcaggtatcctagtttcattattaacagcagctttcgttggtttatttgcatggtaatatgtcgaagagtgactatgataatacattttaactaataaatatgtccaggcatgtcgtctattgatataggtgagatgcttggacttttttattattgatataaaggtatttaaatatttttaaagttaccgaaattgaagcattataaaaaccaagtgcacatggtaatacacttggcttttatgggaaatgaatattattgtacatatgacagtaaggactaggtacagtcatagtacttcgagcaaaatttgttttgttattataaacaacacaaaggagataacttctctattgaagaagttaaaaacattatagcagacaatgaaatgaaagtaaattaaaaattcagaatatttttaattattatattgtgagtgatatttattagggaaagctattcttcatataaattagttaaatagtaaatctttgttagaactctttccatagagttgtgacagcatttttgttgtgctactatttttatagtctaataaatatataaaggggatggtttcgtgaataaaacggttaaagatttaatactagttgtcttaggttcatttatctttgctgcaggtgtaaatgcatttattatttctggtaacttaggtgaaggcggggttacaggtttagcaattattttatattatgcgtttcatatttcaccagccatcactaacttcttggtcaacgcagtattgattgccataggttataaatttttgagtaagagaagtatgtacttaactattcttgtaacaattcttatttcaatatttttgagtttaacagaatcatggcaagtagaaactggaaacagcattgtgaatgccatttttggtggtgtaagcgttggactaggaatcggagtaattatccttgcaggcggtacaacagcaggtacaacaattttggcgagaattgcaacgaaatacctcgatgtaagcacgccatatgctttgcttttcttcgatatgatcgttgttgcaatttcacttacagttattccacttgataaagtattagtaacagtaatatcactttatataggaacaaaagtgatggaatatgtcatagaaggtttaaacactaaaaaagctatgacgattatttcaactaatcccgacaaacttgccaaagcaatagacgagcaaattggaagaggtttaaccattttaaacggacatggctattatacgcgtgaagaaaaagatgtcttatacgttgttatttctaaaacacaagtttcaaaagcaaagcgattaattaaacaaatcgataaagatgcattcctcgtaattcatgatgtaagagatgtctatggtaatggctttcttgcagatgaataaataaatggtatgagcacacatacttaaatagaagtccacggacaagtttttgaactatgaagacttatctgtgggcgttttttattttataaaagtaatatacaagacatgacaaatcgagctatccaatttaaaaagtaatgttagtcaataagattgaaaaatgttataatgatgttcatgataatcattatcaattgggatgtctttgaaaattgataatttaaaaatagaaattattttttataaacagaaagaattttattgaaagtagggaaattatgaatcgtttgcatggacaacaagttaaaattggttacggggataacacgattataaataaattagatgttgaaataccagatggcaaagtgacgtcaatcattggtcctaacggctgcgggaaatctactttgctaaaggcattgtcacgtttattggcagttaaagaaggcgaagtatttttagatggtgaaaatattcatacacaatctacgaaagagattgcaaaaaaaatagccattttacctcaatcacctgaagtagcagatggcttaactgttggggaattagtttcatatggtcgttttccacatcaaaaaggatttggtagattaactgctgaggataagaaagaaattgattgggcaatggaagttacaggaactgatacattccgacaccgttcaatcaatgatttaagtggtggtcaaagacaacgtgtttggattgcaatggcattagcacaaagaactgatattatctttttagacgaaccaacaacatatttagatatctgtcatcaattagaaatactagaattagttcagaagctaaatcaggaacaaggttgtacaattgtcatggttcttcatgatatcaaccaagcgattcgtttctcagatcatcttattgcgatgaaagaaggggatatcatcgctacaggttcaacagaagacgtattaacacaggaaatattagaaaaagtttttaatattgatgttgttttaagtaaagatcctaaaactggaaaacctttactggtaacttatgacttatgtcgcagagcttattcttaattaagtaagttaatatgataaaaaggacaattaacatgacaaatagagagaacccaacgccattgaagtttttatcctatattataggtttaagtatgatactactaatcacactatttatttctacattaataggtgacgccaaaattcaagcctctacaattatagaggctatttttaattataatcctagcaatcaacagcaaaacatcatcaatgagattaggattcccagaaatatagcagcagtaattgtaggtatggcgcttgcagtttctggtgcgattatacaaggtgttactcgtaatggtcttgctgatccggcgctcataggtttaaattcaggtgcttcatttgctttagcattaacatatgcagttttaccaaacacttcatttttaatattgatgtttgctggatttttaggtgctattctaggaggtgctattgtattaatgataggccgatctagacgtgatggatttaatccgatgcgtattattttagcgggtgcagcagtaagtgctatgttaacagcgctaagtcaaggtattgcattagcttttagactaaatcaaacagtaacattttggactgctggaggcgtttcaggcacaacatggtcacaccttaagtgggcaattccattaattggtattgcgttattcattatattaacaattagtaaacaacttaccattttaaatcttggtgaatcattagctaaaggtttaggtcaaaatgtaacaatgatcagaggcatatgtttaattattgctatgattctagcaggtattgcagttgctatcgctggacaagttgcatttgtaggtttgatggtacctcatatagcaagatttttaattggaactgattatgctaaaattctaccattaacagccttgttaggtgggatactcgtgcttgttgccgatgtgatagcacgatatttaggagaagcgcctgttggtgcaatcatttcatttatcggtgttccttactttttatatttagttaaaaaaggaggacgctcaatatgattagttcaaataataaacgcagacaattgatagcactggctgtttttagcattctactatttctaggttgtacttggagtattacctcaggtgaatacaacatacctgttgaaagatttttcaaaactttaattggacaaggtgatgccattgatgagttaatcttattagatttcaggttacctcggatgatgattactattttggctggcgcagcgcttagtattagtggtgcaatagtgcaaagtgtcacaaaaaatccaatagctgaaccaggtatattaggtattaacgcaggtggcggatttgcaatcgcattatttattgcaattggtaaaattaatgctgacaactttgtttatgtactgccgttaataagtatactaggtggtatcaccactgcattgattatttttattttcagttttaataaaaatgaaggtgttacacctgcgagtatggtattaataggtgtaggtttacaaacagcattatatggtggctcaattacaattatgtcaaaatttgatgataagcaatctgatttcatcgctgcttggtttgcaggtaatatttggggtgacgaatggccatttgtcattgcatttttaccgtgggtgttgattattattccttacttactatttaaatcgaatacactaaatattattcatacgggtgataatattgcacgaggtctaggtgtaaggttaagcagagaacgtttaatattattctttatcgcagtgatgttatcatctgctgctgtagcagtagcaggttcaatttcgtttatcggattaatgggtccgcatattgccaaacgtatcgttggaccacgtcaccagttgtttttaccaattgccattttagtaggggcatgtttacttgttatagctgatacaattggcaaaattgtattacaaccaggtggggttccagcaggtattgtcgtagcaattattggtgcaccgtatttcttatatttaatgtacaaaacgaaaaatgtatagtgtcaatggacacaacttattgctatgaaaggcactttattataaggcttttcatagcattttttatttaatgagccactcaagactatttattttttcaataatgaaccattaagttatcaagaggatcttatcaaaaatatatttgataacggtatcaggttaattctttatgatagcgcattcatttattctgttttatactatgactgataataccaaggaggtacaacatgatgaaaaagttaatcaataaaaaagaaacatttttaactgatatgcttgaaggattgttaattgcgcacccagagttagatctgattgctaatacagttattgtaaaaaaagctaagaaagaacatggtgtagcaatagtctctggaggtggaagcggacatgaacctgcgcatgccggttttgttgcagaaggtatgctagatgcagcggtttgtggcgaagtatttacatcacctacacctgataaaatattagaagctattaaagcagtagatactggtgatggtgtattactagttgtaaaaaactatgcaggtgacgtgatgaatttcgaaatggcacaagagcttgcagaaatggaaggtataaatgttcaaactgttattgttcgtgacgacattgctgtgacaaacgaagtacaacgtcgtggtgttgcaggaacagtgtttgttcataagcttgccggttatcttgctgaaaaaggttattcattaacagagataaaatcgcgtgtagaagcgttgttacctgaaattaaaagtattggtatggcaattgagccaccgcttgttccaactactggaaaatatggctttgatattgaagacgacaaaatggaaatcggtattggtatacatggtgaaaaaggtattcatagggaagaagtaaaggatattgatcatattgttggaacattgttagacgaattgtataaagaagttactgccaatgatgtcatattaatggtaaatggtatgggtggtacgccgttatctgaattaaatatcgtaactaaatatattcaacaaaatttagctgcaagaacggttaatgttgctaaatggtttgttggtgattatatgacatctttagacatgcaaggtttttctataactatcgtgcctaataaaccagaatatttggaagcatttttagcaccaacaacaagtcaatactttaaataagaagtgaatatgaataaatatacatttatgaggtggcacaaatgaaagtgaatgatatgaaagcacgtttattaaatttagaagaaacgtttaaaaaacatgaatctgaattaactgaattagatcgagcaattggtgatggtgaccacggggttaacatggttcgtgggtttagtagtcttaaagacaaacttgatgatagctcaatgcaatcattgttcaaatcaactggtatggcattgatgtcaaatgttgggggtgcatcaggaccactgtatggctttagctttgttaaaatgtctgcagtcaccaaagatgatatggataatcaagatttcattacactaattcaggcatttgccgaagcggttgaatcacgtggtaaagttactttaaatgaaaagacaatgtatgatgtagtagcgcgagcagcagagaagcttaaaaatggtgaaactttaacattcaatgatttacagcaattagcagataatacaaaagatatggtagcaacgaaaggtagagctgcatattttggagaagaatcaaaaggttatattgatccaggtgctcaaagtatggtttatattttaaacgctttgattggagatgaagataatgcctaaaattatacttgttagccacagtaaagaaattgcaagtggtacaaaatctttgttaaagcaaatggcaggtgacgttgatattataccaatcgggggattaccagatggttcaattggaacttcatttgatatcatccaagaagttttgactaaattagaggatgatgcattgtgtttttacgatattggatcttcagaaatgaatgtagatatggcaattgaaatgtatgatggtaatcatcgtgtgttaaaagttgatgcaccaattgttgaaggcagttttatcgcagcagtaaagctatcaatcggcggttcaattgatgatgcattagcagaaatcaaacaatcattttagttaaaatttactaataatgaaaaatgtaaacctttttcaaatgaaactttataaaaaatatgatagtatatatgtaaatgtttaataaaatctggagaaataggaggacattgccatgcaacaccttataaaaaaacatgtattgaatggcgagtttgatttagtacgacaattgatgtccgaaacagattttatggaatttgaagaagcatatatttcaagtgcgcatgaagtagaaagtatgatgttttatacatgtattttagatatgattaagtacgaagaatcatctgaaatgcatgacttagcatttttattgcttgtgtatccactaagtgaatatgaaggtgctttggattctgcttattatcatgcagacgcttccataaaacttactgacggcaaagaagttaaaagtttgttacaaatgttattattgcatgcgataccaacacctgttatttcagataagaaggcttttgatatcgccaagcaaattttaaaattagatcctaataataatgttgctcgtaacgtcttaaaagacactgccaaacgtatggacaacgttgttgttgatataaatgaattacaccaacgtaatgcacgttaattacatttcaattatattagcttaataatagttttaacatttggttgggttgggcatatgttccagccttttttaatacttaaaaactaacgaagtatacttgtgtgcacaaatggtttttatacaacattttataaatttatacattttaataaagaacatacgatagatggtttaaaccttgttaactgagaaattttgatatgtattcttcgaaatttaactaaatatacgaaattcaagaagcacaataattaatcatttttcctatacaaaagttcgtatgactgcattataaaagcataaatttataatttttttaaatgtcattgaacgtgataatgtgaatggattgagcaattttgaaaaagtgaaaaataacctatgcgacttgcaattaattttcagtacgttataatgcacactgtgcaaaattaaggaggtctattattcacatgatgatgaataaagaagcaataaaaattggatttgcctacgtcggcattgtagtgggcgcaggattttcaactggacaagaagttatgcaatttttcactaaatatggcttgtgggcttatttaggtgttattatatctggttttattttagcttttattgggcgccaagtagcaaaaattggtactgcctttgaagcgacaaatcatgaatcaacattacaatacgtattcggtgaaaagtttagtaaagtctttgattatattttaatcttcttcttatttggtatagctgtaaccatgatagctggtgcaggcgcaacatttgaagaaagttataacatacctacatggctaggtgctttaattatgacattagcgatttatattacgttgctattagactttaataaaatagtacgtgcactaggtatcgttacaccatttttaattgttttagttgtattaatcgctggcgtttatttatttaaaggtcatgtttcattagcagaagttaaccaagtagtgcctgaagcaagtatttggaagggaatctggtttggtacaatatatggtggattagctttttctgtaggttttagtaccatcgtagcaatcggtggggatactgaaaagcgtacagtgtcaggtgcaggcgcgatgtatggtggtattatctatactgtattactagcattgatcaactttgcattgcaaagtgaatatccaactattaaaaatgcctcaattcctacattgacgttagcaaataatatccatcctttaatagcaacagtgttatctgttattatgctggcggttatgtataatactattctaggactaatgtattcatttgcagcacgttttacagaaccatacagtaaaaattatcatatctttattattataatgatggtagcaggttatttattaagtttcgtaggatttgctgaattaattaataagttatatacaattatgggatatgtaggcttatttattgtagtagctgtaattattaaatatttcaaacgtaaaaatgcggataaaaaacatattgcttaatatcatatgagggatatccgaaactttacaattgaatcactttgttttaaccttaaaagcaattcgtctctactcttatcgggcgaattgctttttatatttattcagtctattaatatgagcgtctaacaaatagagaggtacgatgtaatgaataaagataataaatggacgatgataactgcgctttttataactgtaatcagtgtattgttagcatttcatctgaaacaacattatgaccaaattacaaatgagaaccatgctaataaagacaaaattaatattaaaaataaaaatgtgcgcatttatcaaaaccttacatacaatagagttttccctaacagtaaattagatattattacacctgttgatatgtcttctaatgccaaactgccagttattttttggatgcacggtggtggttatattgcgggtgataagcagtataaaaacccattattagcgaaaattgctgaacaagggtacattgttgtgaatgtaaattatgcattggcgccacaatataaatatcccacaccattaattcaaatgaatcaagcaactcaattcattaaagaaaataaaatgaatttacctattgattttaatcaagtaattattggcggtgattctgcaggtgctcaattagctagccaatttacggcaatacagacgaatgatcgcttaagagaagccatgaaatttgatcagtcattcaaaccatcgcaaattaaaggtgctatactatttggtggtttttataatatgcaaacagttagagaaactgagtttccaagaatacagttatttatgaaaagttatactggcgaagaagattgggaaaagagttttaaaaacatttcacaaatgtcgacagtaaaacaatcgacaaaaaattatccaccaacatttttatctgttggagatagcgatccattcgaaagtcaaaatatagaattcagtaagaaattacaagaattgaatgtaccagtagatactttgttttatgatggtacgcatcatttacatcatcagtatcaatttcaccttaataaacctgaatcgatagataatatcaaaaaagtgttacttttcttaagtcgtaatacatcctctagtggtattcaaactgaagagaaaccacaaatagaaaatccgagtaatgaattaccgttaaatcctttaaactaatgataaacagtagtaatttattacttaagcaacatttaagattttcaaattaaaaacgaagaatttaaaacatgtggtgctaatgtgtaagagtctgagatataataaattgttagcggttctttatcatttctatctcactctattatgatgtgacatttattttacaaactaatttgttttgaacctgaaaataactttttacaactaaattgtcgaaaaacagtgtgtacatgatataataaatttataaattgaaaagaattcaaaagaaaaattaaaatatagattgagcacgaagtgatttgaaataaggttgtgaaagggaatgacaaggtcagcattaaaaccatttaaaaataaacgcgttatggttactggacgtatacaacgtgttttgtttaaaaattatttagatagacatagcacatttaagccgaatgtaaggatattattaaaagatgtatttgtttcaggtgtatcaatagatcatttatggttatatgagacaaataaatactatgcattggcaatggaacttattcatcaacgagtaaaatttagtgcgaatgttgtaccgtattacaaaataaatagaaataataatttattcgtacaagattatggaattaagcgtaaaggtaggttaattactgaagaagcttacaatcaaaacaatcagtatcaggataagatatatgaaaaattaccggatatagattttagactcgaagatttttatagtaaggaaaactaaacaacatatataaagcaccactaatcgtagttgatagttaatcaattacacattagtggtgttttattttgaatttaaatttgataaatgaataagagtgtacgtatttatttgagattagataacattgataagtatgagtaatgtattaggtaaccattaaattcgttgttatacgattctgatacaagattatgataaaatagctttaattaagaattttagccatcatatagtcatcataatatttaccatcgataaataacttatcttttaaaacgccttcgatttgaaaatcggcacttttaaaaagctcgagggcaggttggttattgagtggtacatttgcttcaattcggtgtatttgattgtttaaacaccaagccataatggcatcaagaagtgcttggccaattccacgatgttgatataatttctttacacctaaatcaattttagcaacatgtttaatgcgttgaaatggtgtcgtattaacaaaggcaaagccaacgagttgttcatcactttcagcaacgaagatgactttatgcggagaagtgatatattcttctaattgtttactagccgatgtgacgctaggatcatattctcctggtgtgtagaacatatacggagattcgtcgtatatgttcgctaacattgaaatgaaattttctacatctttgatactaactctacgtataatatgggccataaaaagcctccagtattttgaaattttaaaacatttgctactattataatatatatgtaactaaaaggtggagtaatatgttttttggttacagtttaaaggagtattttagatgaaacctaaagttttattagcaggtggaacaggatatattggtaagtatttaagtgaagtgattgaaaatgatgctgaactttttgctatatcaaaatatccagacaataaaaaaacagatgatgttgaaatgacttggattcagtgtgatatatttcattacgaacaggttgttgcagcaatgaatcaaatagatattgctgtattctttatcgacccaacaaagaattctgccaaaataacacaatcatcagcaagagatttaacattaatcgcagcagataattttggtcgagcagcggctatcaatcaagtaaaaaaagtaatctacatacctgggagtcgttatgataatgaaacaattgaacgcctaggtgcatatggtacacctgtagaaacaacaaatttagtttttaaacgttctttagttaatgtagaattacaagtttcaaagtatgatgatgttagatcaacgatgaaggtagttttaccaaagggatggacattaaagaacgttgtaaaccattttattgcatggatgggttacactaaaggaacttttgtgaaaacagaaaaatcacatgatcaatttaagatatatattaagaataaggtgcgaccgctcgcagtatttaaaatagaagaaacagctgatggaataataactttaattttattgagtggaagtttagtgaaaaaatatacagttaatcaagggaagttagaatttagattaatcaaagagtcggcagtcgtttatatacatctatacgattatatccctcgattattttggccgatttattactttatacaagcaccaatgcaaaaaatgatgattcatggctttgaagttgactgccggattaaagattttcaaagtcgattaaaatcaggagaaaatatgaaatatactaaatgatattgggtgatatggatgcaaatactactagtagaagatgacaatactttgtttcaagaattgaaaaaagaattagaacaatgggattttaatgttgctggtattgaagatttcggcaaagtaatggatacatttgaaagttttaatcctgaaattgttatattggatgttcaattacctaaatatgatgggttttattggtgcagaaaaatgagagaagtttccaacgtaccaatattatttttatcatctcgtgataatccaatggatcaagtgatgagtatggaacttggcgcagatgattatatgcaaaaaccgttctataccaatgtattaattgctaaattacaagcgatttatcgtcgtgtctatgagtttacagctgaagaaaaacgtacattgacttggcaagatgctgtcgttgatctatcaaaagatagtatacaaaaaggtgatcagacgattttcctgtccaaaacagaaatgattatattagaaattcttattaccaaaaaaaatcaaatcgtttcgagagatacaattatcactgcattatgggatgatgaagcatttgttagtgataatacgttaacagtaaatgtgaatcgtttacgaaaaaaattatctgaaattagtatggatagtgcaatcgaaacaaaagtaggaaaaggatatatggctcatgaataatttgaaatgggtagcttattttttgaaatctcgcatgaactggatattttggatattgtttttaaacttccttatgttaggcattagtctaatcgattatgattttccaatagacagtttattttatattgtttctttgaatttaagtttaacaatgatttttcttttattgacatattttaaagaagtaaaattatataagcattttgacaaagataaagaaatagaagaaattaaacataaagatttagcggaaacgccatttcaacgtcatacagttgattatttatatcgtcaaatctcagcgcacaaagaaaaggttgttgagcaacagttgcaattgaacatgcatgaacaaaccattacagaatttgtgcacgacataaaaacacctgtgacagctatgaaattattaattgatcaagaaaaaaatcaagaaagaaaacaagcattactatatgaatggtctcgtataaactcgatgctagatacacagctgtatattactagattagaatctcaacgtaaagatatgtattttgattacgtgtcacttaaacgcatggtcattgatgaaatacaattaacaagacatattagtcaggttaaaggtattggttttgatgttgactttaaagtggatgattatgtttatacagatataaaatggtgtcgtatgattattagacaaattttgtcaaacgcattgaaatatagtgagaattttaatattgaaattgggacagaattaaatgatcaacatgtttcgttatatattaaagactatggcagaggtattagtaaaaaagatatgccgcgaatatttgaacgaggatttacgtcaacggctaacagaaatgaaacgacgtcttcaggtatgggtctatatttagtaaatagtgtaaaggatcaattaggtattcacctgcaagtcacgtcgactgttggtaaggggacaactgtcagattgattttcccattacaaaatgaaattgttgaacgcatgtcggaagtgacaaatttgtcattttaaacatgcgttttgttacttagaattgatacatcaatgcagcttcaacgttataataagatagatgttagtcatatgttaaattgaagatacaagtgccaaagcctaaaggaaatgaagttaagataaattataggagtgttaaagtggcaattttagaagtaaaacaattaacaaaaatatatggaactaaaaaaatggcacaagaagtgttgcgagatatcaatatgtctattgaagaaggcgagtttattgctattatgggtccctctggatctgggaaaacgacattattaaatgttttaagttcaattgattatatttcacaaggttctattacattaaaaggaaaaaaattagaaaagctttcaaacaaggaattatctgatatacgcaagcatgatattggttttatttttcaagagtataatttactgcatacattgactgttaaagaaaacataatgttaccactaacggtacagaagttagataaagaacatatgttaaatcgttatgaaaaagtagcagaagcattaaatatattggatattagtgataaatatccctctgaattgtctggtggacaaaggcaacgaacatcagctgccagagcatttataacattgccttctattatatttgctgacgaaccaacaggtgcactggattctaaaagtactcaagatttattaaaacgattaacaagaatgaatgaagcatttaagtctacaattattatggtaacgcatgatcctgttgcagcaagctatgcaaatcgagtagtgatgctaaaagatggtcaaattttcactgaattataccaaggggatgacgataaacatacctttttcaaagaaataatacgtgtacaaagtgttttaggtggcgttaattatgacctttaacgagataatatttaaaaatttccgtcaaaatttatcacattatgccatctatcttttttcgttaattacgagtgtagtattgtattttagctttgtagcattaaaatacgctcataaactaaacatgacagagtcatatccaattataaaggaaggctcacaagtcggaagctactttctatttttcatcataattgcatttttgttatatgccaatgtgttatttattaaacgacgaagttatgagcttgcattatatcaaacattaggtttatctaaattcaacattatttatatactaatgctcgaacaattactaatatttataattacggcaatattaggtattattattggtatttttggttcgaaactgttattaatgattgtctttacattattaggaattaaagaaaaggttccaattatttttagtttgagggcggtatttgaaacattaatgttaatcggtgtcgcttattttttaacatctgctcaaaattttatattagtgttcaaacaatctatttcacagatgtcaaagaataaccaggttaaagaaacaaatcataataaaattacatttgaagaggttgttttaggcatcttaggtatagtattgattaccacaggatactatctatctttgaacattgttcaatattatgattctatcggtacacttatgtttattttattgtcaactgtgattggggcatacttattttttaaaagctctgtttctctagtttttaaaatggtgaagaagtttagaaaaggtgttataagtgtaaatgatgtcatgttctcatcatctattatgtatcgtattaagaaaaatgctttttcacttacggtcatggcaatcatttcagcgattactgtttcagttctttgctttgctgctataagtagagcgtccttatcaagtgaaataaaatatactgcaccacacgacgttacaattaaagaccaacaaaaagctaatcaattagcaagtgaattaaacaatcaaaaaattcctcatttttataattataaagaagtaattcatacgaaattgtataaagataatttatttgatgtaaaagcgaaagaaccatacaatgtaacaattactagtgataaatacatccctaatactgatttgaaacgtgggcaagctgatttatttgtagcggaaggttctatcaaagatttagtgaaacataagaagcatggtaaggcaattataggaacgaaaaaacatcatgttaatattaagttacgtaaagatattaataaaatctattttatgacagatgttgatttaggtggaccaacgtttgtcttaaatgacaaagactatcaagaaataagaaagtatacaaaggcaaagcatatcgtctctcaatttggattcgatttgaaacataaaaaagatgctttagcattagaaaaagcgaaaaataaagttgataaatctattgaaacaagaagtgaagcgataagctcaatatcaagtttaaccggaatattattatttgtaacatcatttttaggtattacattcttgattgctgtatgttgcattatatacataaagcaaatagatgaaaccgaagatgagttagagaattatagtattttgagaaagcttggatttacacaaaaagatatggcaaggggactaaagtttaaaattatgtttaattttgggttacctttagttattgcactatcacatgcatattttacatcattagcatatatgaaattaatgggtacaacgaatcaaataccggttttcatagtaatgggattatacatttgtatgtatgctgtttttgcagtgacggcttataatcattccaagcgaacaattagacattccatataaaatatacagatggctttcagtagagtagtggattcggattcacgaactatactggaagctttttattataaatgaagagaagttatatttttagcatgtatagttgaatactgggttaaaataccatattaataatgaagtaaaggtatgagtgattatgaaagtgttttgaatgaaatatatttaattggtgatgcttttaattgaaaagattaacaggattcaactttgtaaattgtattaaatgtgagaaaataaaagtatattcattgagagatatatgagtcaatgaacgttttaaacaagataagtgtattttaatatgtaaaagttatgtaataaatattgtatcgttgcaaatttcccaactatatccatttacaatttttagagttgtatagataaaaaattgcctatacaataactttttcaaaacaaatgcctactactatttaaattttatgtaaaagttaagtttcggaattgttaaaaatttgtaaattgaattgtgggattgtaaattttgtgctattttcatataagggcaaatacagtaaattgtttactgtgaggcatttttgaaattaatatcagtacactaaaattatactgacgattgataataacaaatttgtatcattagtttgtaaattcacttgtcttaatttgaaacaaattataactgaatgtgattggtgacaatcgcttaaatggaggattttaaatgtttagtaagaaaaaagataagtttatggttcaattagaagagatggttttcaatctggatcgtgctgctattgaattcggtaaaatggatttcaatacacatttagatttaaaagcatactcagacaacattaaaacttatgagtcacatggtgacgaattagtacatcaagtaattactgatttaaatcaaacatttatcacaccaattgaacgtgaagatattttatcattatgtgatgcaattgatgatgttttagatgcaattgaagaaacggcagctatgtttgaaatgtattcaatcgaatacacagatgaatatatggctgagtttgttgataacattcaaaaagcagttgcagaaatgaaacttgctgtcggcttattagtcgataaaaaattatcacatatgcgtattcattcaattaatattaaagaatttgaaacaaactgtgatggtattttaagacagtcaattaaacatattttcaatagcgaaacagatccaatcactttaattaaaataaaagatatttatgaaagcatggaagaaatcgctgataaatgtcaaatcgtagcaaataattttgaaactattattatgaaaaatagctaaggggagtatatatttatgtcatatataatcatcgtcactatagctgtagttattttctcgctgatatttgactttatcaatggattccatgatacagccaatgcagtagctactgctgtatctactagagcgttaacgcctaaaacggcaattttaatggcagcagtgatgaactttataggtgctttaacatttacgggcgttgcaggcaccattactaaagacattgtcgatccatttaaattggaaaatggattagttgttgtgttagctgcaatacttgcggctattatttggaatttagctacttggttttacggaattccaagttcgtcttcacatgcacttataggttcaattgcgggtgcagcaatcgcatctgaaggctcatttggagtgttacattaccaaggtttcacaaaaattattattgtattaatcgtttcaccgattatcgcattttgtgttggtttcttgatgtattcaatttttaaagttatctttaaaaatgcaaatttaacaagagcgaatcgtaactttagatttttccaaattttcacagcagcgttacaatcattctctcacggtacgaatgatgcgcaaaaatcaatgggtattattacgttggcattgattgtcgctaatgtacagaatgatggcagtgttgaaccacagttatgggtaaaatttgcctgtgcgacagcaatggggcttggtactgcaattggtggctggaaaattatcaaaactgtaggtggtaatattatgaaaatacgtccagcaaatggtgctgcggccgatttatcatctgcattaacaatttttgttgcatcatcgctacatttcccattatcaacaactcacgttgtgtcatcatcaatcttaggtgttggtgcttctaaccgagctaaaggtgtaaaatggagcactgcgcaacgaatgatcattacatgggtgattacattacctatttcagcattgttagcaggtttactattctatatacttaacttatttttctaattgaaaataaaactaaactgaacttcagtatcacaaacatatggtggtattgaagttcagttttttatgtaagtagataacatattttatagaatttacgtagaatgaccaagacaaagcattttaattaggaggctatattataaatgtattccatggaacataatcagttaggtcattaaaatatatgtaagagcaaaataatgatttaatagtttatattcttcaatgaaggaataattaaatagttatcaacttgtttaattaacctaaattgtattgggctttatttaatataaatttgtatatgtagacgaaaaagcgtaaaatactggtataacaaattaaatcattatatagtcaacttagttgcattattttgatttttaatatattatgcatttaatttaatcaaataggtaggttgttaatttttacctaactaccattcatacaaaatataaatatgtatgatagggaagggtgagataattttttgtaccaaaatgaaaatttttttcaaaaataaaaaactagcaatctcacatgatgtgaattgctagtatatatcagtacaatttatttaattaatggatgaatgcatagctagaaacttctgaagctggaattgtacggtagttcatattgtatggaccatatgtgtaattcatttcagaaatcaagatactaccatcaccattgacacgttcaacataagcaacatgaccatatggaccaggtgtgctttgcataattgaaccaactgatggtgtgttgtttacttggtaaccatcattagctgcgttaccagcccaatacttagcgtctgaccaatatgtgctaattggactaccagcttgagcacgacggtcaaatacgtaccatgtacattgaccagcagtgtataaattttggtgattaaaagatgatgcattgccattgctacctgttgtagctgttggtgttgtaccacctgatccaccattaggaatttgtaatgtttggttaggcataattaaataaccacgtaagttattggctgccattaattgatcaactgaaacaccatatctgctagcaatgatatttaatgattcaccagcttgtacagtatgagatgatgctgaaccagcttgtggagaagtgtttgacgtattttgtgcatcacttccacctactgagataacttgaccagggaataccaagttgttatctaattggttattttgtttaatactctctactgaagtgttgtatttttgagcaatactccataatgattcaccagattgtactgtatgttgtgtagaagcttgtgcatcatgatgcgttaaaaatgcagctgcaccagatgttgctgttattgcaaatgctaattttttcaaagggactcctccttaaaattatgttttactacttttaaaaattattaagacaatttatatagtaaattaagttttcgttttatattacgatttccatattatcaaaaataagtagctttgtgtggtttgttattatcttgtaatattattaacattttaggatatcggttcatatttttataaatgctgatttgatagtgtataaaagcgttttagtgattttaactaattataaaaaattatattttgtaacattgtaaaatgtaaaattactatacttgttaaaggttatttcttttgatgaagcaaaatttactgtaaaatttgacgcataaaacgacggtagaaggaggaattattttgtcgcaaaatacaaatcattcatattatcatcaaaaccagcatgctcaatcaataagtaaagtgtggctttattttatgtattattggattatatttggcataggatgctatctaggtcagtttttaccattaagttggcgacaacccttgtcatttggattactgattattattttagcaacacttgtttttgaaagagcgagacggttcggtttaattatttcacatatttacgctgtagtgattggcttattgtcatacgcaacgtttaccacgtatttacaaaatttaggaccagatattttctataaaaatatcgcattagcaatttttgcatttatagcatttggtattattggttatttcttcgttggagatgcatcgagtataggcaaatatttattcgttacattaataacattaattattgcgagtctaattggtatttttcttcaaaatcctattttttacactattattaccgtcgttagtctgttgttatttctactttatactttgtatgattttaatcgtttaaaaagaggtgactattcaccaagagaaatgggatttaatctatttattaatttgttgaatattattaaggatatactttaccttgctaatatgttcagaagataaacagttaaattaataaagaaatttgtataaagttttggaataatcaataatgaatatcaaccttaaactggagcgattgtcataagttagaaacttagactgagattttactgataaagcaataaaaatatattaccttaattgtaaagatattattaatcattgaaatgattaactgctatagttctaaagtaaacaaatcttagaagataaactttaaacaggtgtacttgcctttctaattacacttttattagaaaagtaaagtatagctacgtattaattttaaaatcgaaacattaataggaagaagtatagataatataaacaatttaatgttagtttgagctcatctcaaaagtagaatgtgatttaaataagtgtttatttttaaattgaaaatgaatatataactaacaaaagataatagtaatacgttgtagatgtggtcatttaaaattattttgaaaatactaaaaagtagtgtgttttcaattggatagtttaattaaactgactacatctatttttgtattatttaaatgattgatatataagtttaaaaattaaccattatatagttttatttatttttgatttggtattcgtattgtgttaaatttacgtttaattaaataagttaaatattatagggaatgataaaagtggtacttaaatatagaaagaggtaaagttatggcaaaatcatgcttgcatatacttactaataatgaatatgcgacaacgcgttgccaagatggcatagtcttattttggccaattgacggggaaatcgaactacaaaaatttcgtaaaagtaaaataattgaagatgatatatatattattaatcatctggatgtatttagtattaagaataataaaaaaacgatcatgttgtatttgagtagctattggtttgcggaattaggctttactttctttaattaccactatacagcaaagttgattaaatcatcctataatttgaaatgtctactattaaaattgacatatcgataccttgataatcagcctcttaatgacgctgatattagaaaattacaggatattattaaaatcattgcaaaagaagcaagtatggataaaaagattgcacaaaatcaatatcgatatgcgtattatggtgatttgcgtgatgagctcgaatatatttatcaaaatgtaaatcaacgattgacattaaaaagtgtcgctgataaattatttgtctcaaagtcaaatttgtcatcacaattccacttacttatgggcatgggttttaaaaaatatattgatactttgaaaattggtaaatcgattgaaattctacttactactgatagtactattagcaacataagtgaacatttaggttttagtagtagctccacttactctaaaatgtttaaaagttatatggatataacaccgaatgaatatcgtaatttatcaaaatataataaatgtttaatgctaaagccagaaccactagtaggcaaaatggtgcaagaagtaaaagaaatcatattgaattatattgaacattataaaaaccacctaactgatgttatacatattgatgaagacaaatttgaaacacctaaattgtttcaaacggttattcaaataaatacttatacagaaatgaaattagttttcttagaaggaatctttaaaaccttattgaataagaacagtcaagttgtctttttcatcatgccatcgattctaaaaagtaaaaataccatgtccgaagaagaaaaattcacaatcattaaaacaataattgaaagtgatctaaagatagcatttaatataaataatattgaaacaacttattttgttgaagaagcttttatgagtgttttcagacaaatatctccaaacgaattaagtaatcataataattacgaagtgcattttgtttttgatttatcattgatggaaattagaacaatttatcgaatgatattaaaattacataacatcatgttgaatgtgaaattaggattgaacattacctgtttatttgaaaaaccttcagtttttaaatcactagtatcacaaataaagcgacttaaattcgattcgttaataatagataatgcaaatttaagtagcccttatttgatgggggaaagtgatgagttactattgaaaaatattttgcattttaaaaatttaaaacaagtaattaatgaattggatattgaacaagaaaagctgatttttctaaatgttgaaaatcataaactgcttaataataaagaacgagatctaagtaatagtgctccattaatttataagacattaagtgcgctgtatcacaactttgatggctttggattaaacatttttgacaatcatcaagcatttaatgcgatgcatctatatgacaaaaatggatttaaaacaacactaggtcttatattagaaaagtttatcgaatatgtctcgaaaccaaaatacgaaaacagttattattctatttttgatatagagaattattattgtcttgttatttatgattggcgagtgatagagagcgagacaattatgagtaattttgaggatagtcaagtttatataaattttaaaaacaatgttttaaacgataaatatctaattgtaatagaaacattggacgaaaatagtggcaacattaatcatttgatttctaaagaattaagagataaatatgaatggaaccctagtttactatctaaaattgacaactaccttaaaccagcaatagagattaaagagcataattttagtgataattccttgaatattaacgttacttttaatgcgttatacataattaaaataggaaaaaaataacaccttgatatgtattgcaaaatttaatttgcatttgttggtaattttgacaacgtattaaaaacaaatgagaaagacaatggctgaaaaatttaagataataatgacagaagcattgtctttatatatttgggggtgcaacattttgaatactgagaaattagaaacattgcttggcttctataaacaatataaagcattatctgaatatattgataaaaaatataagttgtcgctaaatgatttagcagtcttagatttaacgatgaagcattgcaaagatgaaaaagtacttatgcaatcatttttaaaaactgcaatggatgagctagatttaagtaggacaaaattattagtttctataagaagactaattgaaaaagaaagacttagtaaagttagatcatctaaagatgagcgtaaaatttatatttatttaaataatgatgatatatctaaatttaatgctttatttgaagatgtagaacaatttttaaatatttaattgaaattgagtgtcgaaagcatagaatttgcttatcggcacatttttaatttatacatattttaaaactaagtaacagtttgaagaaatcgtagttcaataatgttaattgtgaaaatgtatataaacataaaaaaatcatgtataatatatgttgttaattaaacagttcgaaagcgagatgacattatgggacgtaaatggaataacattaaagaaaaaaaggcccaaaaagataaaaacacaagtagaatatatgcgaaatttggtaaggagatttatgttgcagcaaaatctggtgaacccaatccagaatctaaccaagctttaaggttggtgcttgaacgcgctaagacatattcagtgccgaatcatattattgaaaaagcaatagataaagctaagggtgctggagacgaaaactttgatcacctaagatatgaaggatttggcccaagcggatcaatgctaattgttgatgcgttaacaaataatgtaaatcgtactgcctctgatgtgcgagctgcttttggtaaaaacggcggtaatatgggtgtatctggatcagttgcttatatgtttgatcatgtggcaacatttggtattgaaggaaagtctgttgacgaaatacttgaaacattaatggaacaagatgtagatgtaaatgatgtgattgacgataatggattgacaatagtctatgctgaaccagatcaatttgcagtcgttcaagatgcgcttcgtgcagcaggtgttgaagaatttaaagttgctgaatttgaaatgttacctcaaacagatattgaactttctgaagcggaccaagtaacatttgaaaaattaatcgatgcattagaagatttagaagatgtacaaaacgtattccataatgtggatttgaaataatgaaatcagcagaacaatggattgatgaattgcaacttgaatcacatcctgaaggtggtttctatagagagacaattcgagaagtattgaaagatggacgcagagcgccgtttagtagtatttattttttacttacagatgacaatatttcgcattttcatcgaattgatgctgatgaagtatggtactatcatgctggcgattctctaacaattcatatgataaatccggatggggaatatacgactgcaacattgggtactgatatccaaaatggagatgtattgcaatatgtagtgcctaaaggaacaatttttgcttcttcaatcgaaatatcaaatacttttagtttagtaggttgtatgtgtcaaccggcatttgagtttaagcagtttgaattgtttaagcaatctgaattaattacgcaatatccgcatcttaaatcagtaatcgaaaaatatgctttaaaataaaagtgatcaatgaagtggtttgaaggttgttaataaacctttgagtcacttcatttttatatgtattcttgattgaatcagaatagatttgatgcttcagctgtttttaatgaaaatagcattaaatgattttgaaaacgataagagtgtgttatttatatttttgaaaaatcacttttatgaagaaatgtgtgtactatctaattaatattgtctattttaagtaaattgaagcgagttgtagtaaaataataataaatattttcatatgattaacaaaaactataaaactgtatcatgacatgacatcatttatgtagttttatataataatgacaaggagttggtgactgtgaaagtaaagtatatagataaacgtcactggcgtcgcctaattgatagggaatacacagaggtaaaagttaataataataggtttaagggtattataggcttagtcacgatgaaaaaggttcgtgatcctttagaggtgacggtagttggacaaaatatcattgtcgcagatgacaattataaatggttgcaaatactacctgaaaagaaacgttatagtataactgtaatgtttgataataaaggcaatccattagaatattattttgatataaatatcaaaaatataacgcaaaaaggtaatgcgcgtacagtagatttatgtttagatgttttagcattaccaagtggtgaatatgagttggtagatgaagatgatttaatgtttgcattagaaagtgagcaaattacaaaaaagcaatttcatgaagcatatatgattgcacatcaaattatggcagagttagaaaatgattttaaaggattccaaaagaaaatcatgtactgctttaataaaattaatgcaaaggctcaaaaaaatcatcaaaagccacaaaataaaactaatattgaaaaaagcaaacaaataaagcctaagcaatataatcaaactaaaaatcaccaacaacaaaagaaaaactaagtaattcaagctgcagccataccaataaaattggtgaaattattcgttagtaatgaactcatgaatgcttgtagccatgaaagttcaataattgaataatttatggggggaaattatgaagattgaagactatcgtttactaataacattagacgaaacgaaaacgttacgtaaagcggctgaaattttatatatatctcaacctgctgttacacaaagactaaaagctattgaaaatgcttttggagtagatatttttatcagaacaaaaaaacaattgattacaacaactgaaggaacaatgattattgagcatgctcgtgacatgttgaaaagagagcgattattttttgacaaaatgcaggcacatattggtgaagtgaatggaacaatatcaatcgggtgttcttctttgattggacaaaccatacttcctgaagttttgagcctatataatgcccaatttcctaatgttgaaatacaagtgcaagttggttcaactgaacaaattaaagcaaatcatagagattatcatgttatgataactcgtggaaataaggtaatgaatttagctaacacacatttatttaatgatgatcattattttatttttccaaaaaatagacgagatgatgttacaaagttaccatttatagagtttcaagctgatccgatttatataaatcaaataaaagaatggtataacgataatttagaacaagattaccatgcaactattacagtggatcaagtagcaacttgcaaagaaatgttgattagtggtgtaggtgttacaatcttgccagaaattatgatgaaaaatatcagcaaagaacaatttgagtttgaaaaagtagaaattgataatgaaccgctgattcgttcgacatttatgagttatgatccgagcatgttgcaattgccacaagttgattcttttgtaaatctcatggcgagctttgttgaacaaccaaaggcgtagttttagactaatttaaggtttgtatttaattttaaactattcggttaaattgaacgtagttggttgctaatgcaccaacagcaaaagagcccctaattaataaattaaaaggggacaaaggaatacagttggttgctaatgcaccaactgcataagagcccctaattaataaattaaaaggggacaaaggaatacagttggatgctaacgcaccaactgcataagagcccctaattaataaattaaaaggggctctaagaagcggggttatggatatgtttgcagcgttattacaaataaagaattataaactctttgttgctaatatgtttctactaggtatgggtattgcggttacggtcccatatcttgttctttttgcaactaaagatttaggtatgacaacaaatcagtatggattacttctagcatctgcagcgattagccagtttacagtaaattcaattattgctagattttcggatacgcatcactttaatagaaaaattattattattctcgcattattaatgggtgcgcttggtttttcaatatacttttttgtagatacaatctggttattcatattactatatgcgattttccaaggattatttgcaccagcaatgccccaactttacgcatctgctagagaatctatcaatgtttcaagctctaaagatagagctcaatttgccaacacagtattacgttcaatgttctcattgggctttttatttggtccatttattggtgcccaattaatcggattaaaaggctatgctggattgtttggtggaacaataagtatcattttatttactttagtacttcaagtgtttttctataaggatttaaacattaaacaccctattagtacgcaacaacatgttgaaaaaattgctcctaatatgtttaaagacaaaacgcttttattaccatttattgcatttattttattacacattggacaatggatgtatacgatgaatatgcctttatttgttactgattatttaaaagaaaatgaacaacatgtcggttatttagctagtttatgtgctggtttagaagtgccatttatgatcattcttggcgttttatcatctagattacagactcgaacattgttgatttatggagcgatttttggtggtttattctacttcagcattggggtatttaaaaacttctatatgatgttagcaggacaggtgtttttagctattttcttagcggttcttttaggaattggtattagttatttccaagatatcttaccagattttccaggatacgcttcaacactattttctaatgcaatggttattggacagttaggcggtaacctattaggtggtgctatgagtcactgggtaggtttggaaaatgtattttttgtatcagcagcatcaatcatgttaggtatgatacttatattctttactaaaaatcaaaaaattacaaaagaggatgtgatatcaacatgacaattattttatggctacttatcatcgctgccttcatgttagcatttgttgggttgattaagccgattattccttctgttttagtattatgggttggctttttaatctatcaatttggctttcataatcagcatttatcatgggtgttttatgtatctatggcattgctaacaatattaattttatgtgccgactttttagctaataaatattttgtgaatcgcttcggtggttctaagtttggagagtatgcagctttaattggtgtggttattggatgttttgttttaccgccatttggaattattattataccttttattttggtattcatagttgaattaatacaaggctattcatttgaaagagcagttaaagtaagtataggttcaatcgtagcatttttaacaagtagtatagctcaagcaatcattatgtttataatgattgtatggttctttatagatgctttattgattaattaataaaaagcttattgcaaaatatgtttttcggtaactgtaatttagtgattttatcattaacagtaccaaattcgcatatgatgtaataagctttttgtttataaaaatgtatgagaatgttttttcgaaatatttctttcaatgcgtaatccaataggcataactataaatgaaaatataataaatacccaattgcttacctgaatatatggtccaaaggcaagtaatgattgtggaataaagaatacatagaaaaatcctacaattagtagaatgattgctaaataggtgaatatccatatccaatttgaattgttaaaacactgcagttgtattgttttaaaactaaaccatataaataaaaagacaataaagaatccaacgactactgaaaacgggaatgaaacaaaatataaattacttccatttttttccatgaaaaatcctaaaaatcctttgagaaaactaacaatcccaattaatagaacgatgtgttgatagatatatttaaaaatatttttaaatgtttcattaggcatcgcttttagttcttttattgcatgtgcttttgggtcgtgattgaaaaaatctaaggctaataaaccatgttgttctgcgcttaataattgtttgagtatacggttaataattaactctgtatcatgagggttgacgcgaaagtcagagcgcatataagtcatataattctcgaagatttctctatcagtattgcttaatcttaatgatttaacattattttcttttgttaattgcgcagtacttttcattgttacttaagcgctcctttaaaaatgtttaattccaaattaaaatggaaatgattttatagtattaataaggtcaatcatatcatattaaacgcataaatataacgattaatattggagaggaaaatgaggacacttaataaagatgaacataattatatcaagcaaatagctaatatacatgagacattattgtcgcaagtagaatccaactataaatgtactaaactgagtattgctcttaggtacgagatgatatgttcaagattagaacatacaaatgataaaatttatatatatgaaaatgaaggtcaattaatagcgtttatttggggacattttagtaatgaaaaaagtatggttaacattgaactgctatatgttgaaccacaatttcgcaaactgggaatagctacgcaactgaagattgcgcttgaaaaatgggcaaaaactatgaatgcaaagcgaataagcaatacaattcataaaaataatttgccaatgatatctttgaataaagatttaggttatcaagtgagtcatgtgaaaatgtataaagatattgattagaattaggattatgttgctaattcatgttaaaattaaaaaagatttaatgacgttaaggagttttatatgaagaaattaatcatcagtattatggcggtcatgctatttttaacaggttgtggtaaaagtcaagagaaagccactctggaaaaggatatcgataatttacaaaaagaaaataaagaattaaaagacaaaaaagaaaagcttcaacaagaaaaagaaaaattagcagataagcaaaaagaccttgaaaaagaagtgaaagatttaaaaccttcaaaagaagataacaaggatgataaaaaagacgaagacaaaaataaagacaaagataaagataaagaggcatcacaagataagcaatcaaaagatcaaactaagtcatcggataaagataatcacaaaaagcctacatcagcagataaagatcaaaaagctaatgacaaacaccaatcataatcgaattgcttacttgttatagatgaaaggtacagcgttttaaaccttattttaagggtatgtattaattaaaatgtggtcatgattgaaacagaacgtaaaaatagacaacgtaattaataaaggagagaaacggcatgcatgaacaagattttagaattttagagggtcaagatattactttgccagaattaggtagagaattagaaaatattacaggacatacgattgctgattctactggcgaaattaagcgtgtaattgcacatttaccaaactttgagtccgatacagatacttttgttgctacatatcgtttaaaccatcaacaagattttatagatgcaacttttactgcgctgaaatcagatagagcacgtttaaaagaagtgccagttcatgttgaacttataagttatatttctaaatcaaaataaactgctatctaaaacgcaaagttgatcaaaatatcgattttgtgttttttattgagaaattatataggagtgtcaatcgatgatttattgtgaaacagagcgtttaatattaagagactggcatgaagatgatctgttaccttttcaaaaaatgaatgcgaattatgacgtacgtaaatattttccaagtttattgagttatcgtcgttcagaattagatatgagaactatggatgcggttattaaagattatggcattggattatttgctgtagaagataaagagtcccatcaatggataggctttataggtttgaattatattccagaaacaagcgattatccatttaaagaattaccgctttatgaaataggttggcgcttgttgccagaattttggggaaaaggattagcaactgaaggcgcaaaggcaacattgaagttagcagaagaacatcaaatatacgatgtctatagttttacagcagaagcaaataaagcttcacaacgtgtaatggaaaaaattggcatgacagtgtatgatcatttcgaattacccaatctaagtaagtatcatttattaaaaaggcaagtgcgctattacattaatcttcgaaagtgaaaaatttatacataagcgtaacaaacacccctaacattgtttagctgatgataacaatattaggggtgtttgtttattttttaaccttagaatgattaatcgtatgaacgagtacccagaggtttgaaatttaatattgattcaattaatgattccttagtgtcgcataacggtgcaagagcacgatacttaggatcaataaaaccttcctcaatcatatggtcaatcattgtttgtagtggattgaaaaagccattaatattataaatggcaataggcttttcatggatacctatttgagcccaactatacatttcgaaaaattcttctagtgaacctgcgccaccaggagccatgacaaatgcatctgcaagttctgccattttatttttacgttcatgcatagaatcaactaaaattaattcagttaaacgttggcttgtgatttcatgttcatctaacattttaggcatgacgccaatagctttgccgccatgatctaatacaccatcttgaatggcacccataatgccaattgaccctgcaccaaatactaattcataaccttgttcagcaaaatatttacctaaatcgtatgctttttgtacatatgaagggtcatgacctttgcttgcaccacaataaactgcgattcgtttcatgttaatccagctccttaattcgatgaatgacttttaatagtgattgttcaaacactttttgatcttgctttgtaaaaggtgggggacctttgtggcgaccaccttgttttctaatttgtgcattcatatatcgtttatctaatagttgttgaatatttttggaattgtatatcttcccattatgatgcatgacaattaagactttgtcgactaataaacttgcgagtccataatcttgagtgactacgatatcatccttcgttgataattgaacaattttgtaatcaactgcatctggtccatcatcaacatataatgttgatacatgtggaggatataattggttcgaaaaatggctgaagctccgaataattgtcacaaaaatgcctgtctcagttgttaaatctataatagaatcaacaacaggacaagcatctccatcaataataatatgtgtcacaattatgcctctgtattgttttctttattttgttgagaggcgcttttggcaacataatctttatattttttaaatgacttgatgcgtgctttatcagcttcttgttggcgtttttgttcttctttgtgtcgtttttcaatatttttttgtaactttttattcattttagcgatttctttgcgatttttttcagctagtttatcgccttttttctcagttttctcatctaatttattaggtgttaagcctgctttttcttcgtatttttgtgattttttcatatctttaatacgttgtatttcattcttttcgcgggctttttgctcttctttatgacgcttttcgatatttttttgaagtattttattcattttatcagcgtctttacgattttgtttagctaatttttcgccttttttctcaatataggcaggatcatgttctctagcaaactttttaagttcacgtttattttcaaaatcttgttttttatcgccgacatattctttaacatcactcgctgtgttactgattgctgcagatgtttttgaagcaactttacttgtagcatctgtaactttttgtacgtccggatgttgtttgatacgtttacgttcaacaattaacggtaccaatacaattggtaatacattaatcataaatttgatgacttttttcttatccatagatcttgcctccataattactttattaattttacataccctatgatacatcaatataaacgatgatagtagtgaatcactattaagtatttcagatgttttttaaaagaagacaataaaaactgccaatcaagtgattccttaattgacagtctatattttaaaaggaaattaaatacctttaccaatgccaaatccgaagtaaagtatagcaataaagattactaatacaattctgtaaatggcaaatggaattagtttgattttgttaattagatgcaagaatgttttgattgcaattagtccaacagtaaatgcagctaaaaagcctaaaatataaaaaggtatatcagcaatctgaatatcttgataatgttttaataaagataaaccactagctgctaacataattggaacagccataataaatgtaaagtccgatgctgctttatgatttaatttcattaataccccagttgaaattgttgagcctgaacggctgaaaccaggccacatagctactgcttgagaaataccaattacaaatgcttggaaataactgatttgatctactgtttgtgggtttttaactttagctgagtatttatcagcaataatcatatagatagcacctacgaataagccaatcataacagttggcacactaaataaatgttcttcgatgaaatcatcaaatagtaagcctaaaatacctgctggcaccatacccactaatacatgtaataaatttaaacgtcttggctttgaacgtctttgttgatcgttatctccttcaacatgtttgtgtttaccaatatgtaaaatctctaagaagcgttcgcggaacacccatgctgctgcaaagacggatcctaattggatgacgattttaaatgtaaatgctgactgagaacctaaaaattcagatgattttaaccatatatcatcaactaggatcatatgtccagtagaggaaacaggtgcaaattctgttaatccttcgacgacccctaagataataccttttattaattcaatgataaacataatgtacccactttcattactcaatttaatttatttaaatatcaaaattaccatatcatgatagcatattcatttaaagacatgctagttatagttataatactagactaaagatgtatatattcattttcttttacatgtaaaactacaatattttattgagctatttaatttgattttaaggaaaaccttttataataggtttaggtgatataattgtgaaaaaattaacaacaatactgtttcaatataaaatttttccggtactcatgttcttggtcagtactggtctcggcataatcgttataacgcaaaatattttaatagcagattttttagctaaaattataagacatcaatttcaaggtttatggattgtattatttattttattaggtgttttacttttaagagcaactgtgcaatttctaaatcaatggttaggtgatacattagcatttaaagttaagcatatgcttagacagcgggttatttataaaaataatggtcatccaatcggtgaacaaatgactatactcacagaaaacattgatggtctagcacctttttataagagttatttgcctcaagtgttcaaatcaatgatggttccgctcatcataatcattgcaatgtttttcatccatttcaataccgcattaattatgttaataactgcaccatttattcctttgttttatattattttcggtttgaaaacgcgagatgagtcaaaagatcaaatgacttatttgaatcaatttagtcaacggtttttaaatattgctaaaggtttagtgacgttaaagctatttaatcgtacagagcaaacagagaagcatatttacgacgatagtactcagtttagaactttaacaatgcgcattttacgcagtgcttttttatcgggattaatgctcgaatttataagtatgttaggtattggattggttgcattggaagcaacgctaagcttagtagtatttcataatattgattttaaaactgcggcaattgcgattattttagcgcctgaattttataatgcaattaaggacttagggcaagcgttccatactggaaaacaaagtgaaggtgccagtgacgttgtgtttgagtttttagaacaaccgaactataataatgaatttctattaaagtatgaggaaaaccaaaagccatttattcagttaacagacatatcatttcgatatgatgattctgatagattggtattaaatgatttaaatttggaaatatttaaaggtgatcaaattgcacttgtaggtccaagcggggcaggtaaatccactttgacacatcttattgcaggtgtttatcagccaacaataggtactataagtacaaaccagcgtgatttaaatataggaatacttagtcaacagccatatattttcagtgcttctataaaagagaatattacgatgtttaaagatatagaaaataatactattgaagaagtgctagacgaagtaggtttattagacaaagtgcaatctttcacaaaaggcattaacacaataataggtgaaggaggcgaaatgttatctggtggacagatgagacgcatagaactttgccgtcttttagttatgaagccagatctcgttatatttgatgagcctgcaactggtttagatattcaaacagaacacatgattcagaacgttctgtttcaacattttaaagatacaacgatgattgtcattgcacatagagataatacaattcgccatttacaacgacgcttgtatatagaaaatggaagactgattgctgatgatcgcaatatttcagtaaatataacagaaaatggtgatgacttatgaaaacacgactaaaatttcaagtagataaggatttattgttagctatagttgttggtgtttgtggaagtttatttgcgctcgccatgtttttcttaagtggttatatggtgacacaaagtgcacttggtgcgccactatacgctctgatgattttagtcgttacagtaaaattgtttgggtttttaagagctattactcgatacgtagagcgccttatttctcataaagctacatttacaatgctacgtgatattcgggtacagtttttcggtaaattagtaaatgtcattcctaatgtttaccgtaaactgagttctagtgatttaatttcacgtatgattagtcgtgttgaggcattacaaaatatatatttacgtgtttattatccaccagtcgtcatcggtttgacagcgctagttacagtcatagttttggcgttcatttcaatcggccatgcgctattgattatggttagcatgttgttcactttactcattgttccttggttaagctcaaaaaaagcacgtactttaaagaaacatgcagctaatgaacaggcccgatttttaaatcatttttatgattataaagctggtatggatgaactacgtcgatttaatcaaattaatcattatcgagataatttgatggctaaattaaatcattttgataaattacaacttaaagagcaacgctttttaacgatttatgattttatattaaatattattgctatgctttcgatttttggtagtttagttctaggattaattcaaattaatgcaggccaactaaatattatttatatgacgagtatagttttaatggtcttaactttatttgaacaagctgtaccaatgacaaatgtcgcgtattataaagcggatactgaccaagcattgcacgatattaatgaagtgatatctgtaccttctactaatggaaaaaaacgtcttaatgataagtatgatgcaacgaacatttatgaagttaaggatgctagttttaagtattggaatcagcaaacgtatgtgttgtcggatattaattttaatgttaatagaggcgaaaagattgcgattgtgggtccttctggttcaggaaaaagtacattactacaaattatggcagggttatatcaattagatagtggctctgttcgtttcgaaaatatggatatgtttgaaatagatgacaaagataagtttgaatcgttaaatgtcttgctacaatctcaacaattatttgatggtacaatacgtcaaaatttatttaccgatgaaaaagatgaagcggtgcaagcaatatttaagcaattagatttagaacatttggcactagaacgtcaaattgacttagatggtcatacattatctggcggagaaattcagcgtttagcgattacgaggatgttattaaaagatactgcatcaacatggattttagatgaaccaacaactgcattagataaacaaaatagtttaaaagttatggatttaattgaagcacatgcagaaacattaattgttgctacacacgatttaactttattgtcacgttttgagaccatcattgtgatgataaatggtaaaatagttgaaaagggaaactatcaacaattactagctaatcaaggtgctttatggaatatgattcaatataatgcataaaaaaactgcttgataggctaagaaacctttcaagcagttttttaactaacaagcttacgcgtgctaattgtttttctattcttaataaattctaaacattactttaattgtcatgacaaaagttaattatttttcctttgtttcatcaaatgcatgaatgactttacctaataagcgattaagttctttaacttcatcttgcgataaagaagaagctgaagcgactttgtcagatgcattacttaattctggtctaatagtttcacttttgtcagtcaagtgaataaatacttcacgttgatcgacttcggaacgttcacgcttaattaagtctacttgttccattcgttttaataatggtgatactgtaccagtatcgagtgctaattcagttacgactttcttgacgtttacaggagattcatcccataaaattgttaagacaagaaattgtgggtatgttagattgtacttcttaaaaactttgttagagtagtagcgattaacttgtctttgagcattgtacaaactaaagcatagctgttcttttaaattatgttgatcagacattaaagttctcctccagacatactatccgtttttttctcttttcggattggtaatcattaaaaagttgattgtttattaattcacaactttctttgattcaatgccatgctaaaattaaagtatgtttaaagtttagaagatatttttgattaaatcaagagtcaagtccagactcctgtgtaaaatgctatacaatgtttttaccatttctacttatcaaaattgatgtattttcttgaagaataaatccattcatcatgtaggtccataagaacggctccaattaagcgattggctgatgtttgattggggaagatgcgaataatcttttctcttctgcgtacttcttgattcagtcgttcaattagattggtactctttagtcgattgtgggaatttccttgtacggtatattgaaaggcgtcttcgaatccatcatccaatgatgcgcaagcttttgaatattttggttgatcgatataatcatgaatcaatcgatttttagcctcacgcgctaagttaatatctgtgaacttaaaaattcctttaacagcttctctgaaagattttgaattttttttaggaatggtggtaaagatatttcttaggaagtgaacttggcatctttgccaacttacgttggtgaaggattttctaatggcagagactaatcctttgtgcgcatcagaaataacgagttccgtaccttgtaaaccgcgttcttttaggtattcaaaaaatgttgtccaggtctcttcgctttcgccactttgaatcatgaagccgataatttcacggtcgccatctttggttattccaatcgctatatgacagctttttgagagtactcgattttcttctcgtacttttatatagagtacatcggtcattaagtaaggataatttttttctgataataaacgattctgccactcgttaaccataggttctagctgttctgttaagctagaaacgaaggacttagagacggatttaccacaaagttcttccacaatttttgatactttacgagttgaaacgcctgatacatacatttccaacattgaagccatgagggctttttcgtttcgttgataacgttcaaacactgtgggtgaaaaatggccatcacgtgttctgggtacttttaattctagcgtgcctacacgtgtcgtaaagctgcgctcataatagccatttcgttgactttgtcggttttctgttcgttcatattcttttgcttgaatatattctgttcgttgattttccattagttgattaaataccgttgttaaaatatttttagaaacgtcatcctttacagaatattcaataatgctttgaatctcttcgcttttcagtgtaaaatgtacttgggtcatgtaaaagtcctcctgggtatgtttttgtcgttaaaaacattgtaccgtaaaaggactgttatatggcctttttacttttacacaattatacggactttatcaaatcaagcaaaaagataatttaatatatatgttatcatttttaaaaataactgtaatagaaaagagaatataaaatgaaaaataataaagatgaaaaaataagaatatccataattaacggatttttgggtagtggtaaaaccacgttactgacacattatattagtgaattattaaaaaatgatgagaaaattaaaatcatcatgaatgaattcggtacttttgatattgatagcaatagtatttcaaatgaaattgaagtccattcattgattaatggttgtgtttgttgcgatcttaaacaagaacttgtctatgaactaaaagccattgctttaaaaggggacgttaatcatgtcatcatagaagcgacaggcattgcgcatcctttggaattactagttgcatgtcaagatccgcaaatcgttaatttctttgaaaagccgattatttatggtgtattagatgcgactcgatttttagaacgtcatcaatataccgaaaatacagtttcgctgatggaagatcagttgaaactaagtgacatgattattattaataaaattgatcttataactgatgacagtcttgagaaaattgataagcaattaggtatgatttgtgcaagtattccaacttataaaacaacctatggaaaagtttcgttggaagaattggacttaactgttaaagacagagagatatcgtctcatcatcaccatcatcatgggattaaaagtatgacttacacgtttacaggtccgattgatcgtcatttgttttatcaatttataatgaaattaccggaatctgttctacgtttgaaaggttatgtgtcatttagagatcaaccaaatgcaatttatgaatttcaatatgcatatggtttaccagactatggaataattggcatgcaattaccattaacgattgttattattggtgaaactttagatacaaatcacatacgtaatcaattggatatgctacaatttacgtaaatcagaaaatgtgttgtttcaatttaacggaaatagcacattaatttcttaatacttttattgtgaatattttgtgacattgagggatggagtggatgagatatggaacaaataatgattaatcactatgttcatttttctaggcttgtacaaggtttttggcgtgcaaatgaatggaagatgactgcgaaagagttaaattattttataaatgaattagttgaacgtggaattacaacgatggatcatgctgatatttatggagattatcaatgtgaatcactgtttggtaatgctttggatttatcacccgaattaagaaataaaattcaaattgttacgaaatgtggtatcattttgccttctaagcaatttgattttacaaatggacatcgttatgatttgagtagtaagcacatcgtgaaatctgttgaacagtcattaatcaatttgaatgtagattatttagatagtctactcattcatcgtccttcaccattgatggatccagaacaagttgctgatgcattaactaaacttgttaaacaaggtaagttgaagtcattcggggtgtcgaattttaatcattcacaataccaattgttaaatcaatatattatgaaagaaagactacatattagcatcaatcaattagaattatcgccatatcacgttgatagtttacaagatggaacaatggattcaatgtatcaaaaccatgttcaaatcatggcttggagtccttttgcaggcggtaaaattttcgacaaggaagatattaaagcgcaacgtattatgaaagttgttcaatcaatagctgacaaatatggtgtgagtgacacagctgtgatgatagcgtggttagtaaaaataccgcatcgtatcatgccgatacttggaacaagtcagttaaagcgtattgatcaagcaatcgaagggctacaacttaatttagatgatcagtcgtggtttgacatttacaccgctattatcggacaagatattccgtaaacttatttacttttaaatcataaaggagcatatcatgacaaacgaagataaacgtttcgaacaattaagatttgaacgcaaatttatagttattccgtatttaatttatgcagtcattgtattactattaaatattttctattctgatttgaaaataacaatgacattattcggacttttctttgcgtataatgtagtcattttgttcatagcatttgttaaacattataaacgcacattgttactaagtcttatattaacagtgcttagtggcgcggcattctttggaattatttatgtttatggcattaatcatttttaaacattaaaaagagactatctacaataatctcatttgcattttatctaactaagtttaacttttgcttagaaaaatgatgctatgaggatattcagtagatagtttttttatgatctaatatttaaacttagatatcgttttgtaattaaccgagataactcatcacctagcaatattatttacaaaatatttcgataaaattgtgtattttgcataaattaaaaatgtatgttttaaaaaattgttataattaaattaagattaaacaaaggggtgactgttatgtcagaagaaaaacatgtagttgaacatgaacaacaaaagaaagaaaagacaaaaaagcaatacaagccattttggattgtcatgagttttataatacttatagttgtactattactcccggcaccttcaagtctgccgataatggctaaggcagtactagctattttagcttttgcagttattatgtgggtaacggaagctgtatcatatccggtgtcagcaactttaattattggcttaatgatattacttttaggatttagccctgttcaaaatttaggggagaagctaggtaatccgaaaagtggcagtgctattttagctggaagtgaccttctaggaactaatcatgcattatcattagcgtttagtggatttgcaacttcagctgtagctctcgttgcagctgcattatttttggctgctgctatgcaagaaacgaatttgcataaaagactagctcttttagtgttatcaattgttggtaataaaactagaaatatagttattggagcaattatcgtttcaattgtacttgcatttttcgttccttctgcaacagctagagcaggggcagttgtaccaatcttgctgggtatgattgcggcatttaaagtttccaaagatagcaagttagcgtctttattaataattacttcagtacaagctgtgtcaatttggaatattggtatcaaaacggcggcagcacaaaatatcgtagcgattaattttataaaccatcaattaggatttgatgtttcatggggcgagtggttcttatatgcagcgccttggtccatagttatgtccgtagctttatatttcatcatgattaaagtgatgcctccagaaattaatacaatagaaggtggtaaagatttaataaaagaagaattgcataaacttggccccgttagcccacgtgaatggcgtttaattgttatatcgatgttattattactgttttggtcaactgaaaaagtattacatccgattgactctgcatccattactattattgctttaggtgttatgttaatgccgaaaattggtgtcatgacatggaaacatgttgaaaataaaataccatggggaacaattatcgtgtttggtgtaggtatttcactaggtaacgttcttttgaaaacaggtgcagctcaatggttaagtgatcaaacttttggtgttttaggtttaaaacatttacctattatcgcgacaattgcgcttatcacgctttttaatatattgattcatttgggctttgcgagtgcaacaagtttatcatcagcgttaatacctgtttttatttcgctaacctctacgttacacttaggagaccagtctataggatttgttttaattcaacaatttgttattagttttggtttcttattacctgttagtgcacctcaaaatatgttggcttatggcactggtacttttacggttaaagatttcttgaaggcaggtataccattgacaattgtagggtatattctagtgatagtttttagcatgacttattggaaatggttaggtttgctttaattaaaaatataaataagaatctaggttattttaaagtgacaaaaagcttaataaaataaaaagataattgaagggtgttttgtttatggcaattgctgtgttattaaatcgaatgtttcgaatggaacacaatccattatttgaatatatttatcaacaaaaagaagacattgatgcatgttattttatcattccggaagaggacatgtcttcagcttctgatttgaaagcacagttttatcgcggtactttgcagcgcttttaccaatcgttgcacgcagaaaagcttacaccttatgttatgtcttatgacgatatcatttcattttgtaaagaaaacaatatctctgaagtagtgactgcgggtgatattatgagttatcatcttgaagaatatgatattttacatcaacgttctttattcaatgaagcacgcattgccgttactttgatacgtgggaatcattactttaaagcgagtaaaacaatgaatcaacaaggggagccatacaatgtttttactagtttctataaaaaatggcgaccttacttgaggcatagagacgtatatcactatgatttaaaatcattcgaagactttgtcattgcatcacctgatgatttagtgtttgatgacatagcatttggatcctcacaaataattgaacagaataaatggcaacattttttagatcaagatatacagaattacgaaagcggaagagactatttacctgaagtattaacaagtcagctaagtgttgctttagcatatggattattagatattattgaaatttttaatgatttattggcgcgttatgatgaagatgaggcaaactatgaagcatttatacgtgaactcatttttagagaattttattatgtgttaatgacacagtatcctgaaacctcataccaagctttcaaacctaaatatcgacagataaaatggtcgcaaaatgaagcggattttaatgcatggtgcgaagggcaaacaggatttccaatcattgatgcagcaataatggaattgacacaaactggttttatgcataatcgaatgagaatggttgtgtcgcaatttttaaccaaagatttatttatagattggacatggggagaaaaattctttagaaagcaccttattgactatgatgcagcatcaaatattcatggatggcaatggtctgcttctacaggtacggatgcagtgccgtattttagaatgtttaatccaataagacagagtgaacgctttgatgctaaagctttgtatatcaaaacatatcttccgatttttaatcaaattgatgcaaaatatttgcatgatacacaacgcaatgagtccaacctttttgaacaggggattgaattaggtagtcattatccaagacaaatggtagatcatcaagaaaaacgtacacaagttttagctacatttaaagcgctagactaattcggctcaattgatagatctggcatgagtaaaatctggagcagaatataaagttcttaagcaatataaataagccaatttctattattgatgtgatagaaattggctttcctcaaatatataagttgtatttagttttcttattaatttgatgttatcttagtatgtccgtaaataaagtgaggtatagtacgacatactctaaaaacgtagcgagataaatatatttcaatctaacttttatgttttgaggcacttgccatttaggatattgtcgttcgtaatacgacacttgttgtataaatacacctagtccaaatggcagcatcatgagtaagatacttcttaaataacttaaaccaatatcatgccatatgtgtccaataatcaattgaaagacaatgatagatactattaaaacgattatatttattgtcacttgttcaaacgcactccttttccaaataatagaattgctgcttgcatgacaaccataaaacatacaaacatagcagttttaagcgttagactttctagaatgtgatttagaacatgtaagggctcattaaagaaataaacggaatgtaagcgtaagaaacgaccaatataaattccgaatccatttaaaaacattagcacgacaacaattaatctattaagccaacggtgagaagtcaatgttagtatttcaaaatagattaaaatcatcacataaaccgctaagaagacaccaagcagtaaataggtaaagtatttccactcacttaaatttagtcctgcgtaaaagttgaattgaaattggttcaaatggattaaatcagttaccatataaaatgtatttggtaaaagtaacacaaatataaaactatatatgataaagagtggccattcatactttttattcggtttgaataatcgtaataatagactaagctcaaaaggtatatatgctaaaaacgataaagtccgtataattgtgtaaaagtaaaaaggccatataacagtccttttacggtacaatgtttttaacgacaaaaacatacccaggaggacttttacatgacccaagtacattttacactgaaaagcgaagagattcaaagcattattgaatattctgtaaaggatgacgtttctaaaaatattttaacaacggtatttaatcaactaatggaaaatcaacgaacagaatatattcaagcaaaagaatatgaacgaacagaaaaccgacaaagtcaacgaaatggctattatgagcgcagctttacgacacgtgtaggcacgctagaattaaaagtacccagaacacgtgatggccatttttcacccacagtgtttgaacgttatcaacgaaacgaaaaagccctcatggcttcaatgttggaaatgtatgtatcaggcgtttcaactcgtaaagtatcaaaaattgtggaagaactttgtggtaaatccgtctctaagtccttcgtttctagcttaacagaacagctagaacctatggttaacgagtggcagaatcgtttattatcagaaaaaaattatccttacttaatgaccgatgtactctatataaaagtacgagaagaaaatcgagtactctcaaaaagctgtcatatagcgattggaataaccaaagatggcgaccgtgaaattatcggcttcatgattcaaagtggcgaaagcgaagagacctggacaacattttttgaatacctaaaagaacgcggtttacaaggtacggaactcgttatttctgatgcgcacaaaggattagtctctgccattagaaaatccttcaccaacgtaagttggcaaagatgccaagttcacttcctaagaaatatctttaccaccattcctaaaaaaaattcaaaatctttcagagaagctgttaaaggaatttttaagttcacagatattaacttagcgcgtgaggctaaaaatcgattgattcatgattatatcgatcaaccaaaatattcaaaagcttgcgcatcattggatgatggattcgaagacgcctttcaatataccgtacaaggaaattcccacaatcgactaaagagtaccaatctaattgaacgactgaatcaagaagtacgcagaagagaaaagattattcgcatcttccccaatcaaacatcagccaatcgcttaattggagccgttcttatggacctacatgatgaatggatttattcttcaagaaaatacatcaattttgataagtagaaatggtaaaaacattgtatagcattttacacaggagtctggacttgactctaaaaacaaatttaaagtcataaattgaaaaattttagtctcaaaaagggagacgataaataaaattaaaaagtaaattctagcgatgtatcgagattgcatcaataataaacactactttctaatgaaaaagttattcattcaaatgtgatagttataaacgcattcaattcctaattaaaaatttaatttaactcgttgaagtatattaataaacgagaatgcatttatgattaagcacttatgataacttgtaataaaatttgattcaactaaaaagtaaagtgctattgaggatcaagtaaatttaaaccgactgcatctttgaatgaacgttgaatgtccaaatcagttacagtaagaatgatttcagcagttgcagaaacaattgctttagcgagatgtccgctaaaagtttcatatgattgagtaccgaaagtagcatgcaaatgtgcaaaatgaccattgtctagacgagaaatattacctaataagctcgtcaattccagtggctcagtaatatgtttttcttcgtattgtttcgttgttaaattgaaaaattttaatacaacgtcatcacatgcaccaatgccgctgacagatgtaaatgttaagtcttggtcatctgcaaaggttgttatacattcaacgatatcttctcctttttccaacactagtagtatagtatgattacttttttgcaatttcatatgatcaatcccctttattttaatatgtcattaattatacaattaaatggaaaatagtgataattacaaagaaaaaatattgtcaaatgtagcaatgttgtaatacaatatagaaactttttacgaatatttagcatgaattgcaatctgtcgtggaaaagaagaataacagctttaagcatgacatggagaaaaaagaggtgagcatatgaataaacagatttttgtcttatattttaatattttcttgatttttttaggtatcggtttagtaataccagtcttgcctgtttatttaaaagatttgggattaactggtagtgatttaggattactagttgctgcttttgcgttatctcaaatgattatatcgccgtttggtggtacgctagctgacaaattagggaagaaattaattatatgtataggattaattttgttttcagtgtcagaatttatgtttgcagttggccacaatttttcggtattgatgttatcgagagtgattggtggtatgagtgctggtatggtaatgcctggtgtgacaggtttaatagctgacatttcaccaagccatcaaaaagcaaaaaactttggctacatgtcagcgattatcaattctggattcattttaggaccagggattggtggatttatggcagaagtttcacatcgtatgccattttactttgcaggagcattaggtattctagcatttataatgtcaattgtattgattcacgatccgaaaaagtctacgacaagtggtttccaaaagttagagccacaattgctaacgaaaattaactggaaagtgtttattacaccagttattttaacacttgtattatcgtttggtttatctgcatttgaaacattgtattcactatacacagctgacaaggtaaattattcacctaaagatatttcgattgctattacgggtggcggtatatttggggcacttttccaaatctatttcttcgataaatttatgaagtatttctcagagttaacatttatagcttggtcattattatattcagttgttgtcttaatattattagtttttgctaatgactattggtcaataatgttaatcagttttgttgtcttcataggttttgatatgatacgaccagccattacaaattatttttctaatattgctggagaaaggcaaggctttgcaggcggattgaactcgacattcactagtatgggtaatttcataggtcctttaatcgcaggtgcgttatttgatgtacacattgaagcaccaatttatatggctataggtgtttcattagcaggtgttgttattgttttaattgaaaagcaacatagagcaaaattgaaagaacaaaatatgtagcataagtattttggtgtatattgatataaagtaaagcgtaatattatgaatgattagcatcgtttttcttatgaattttattaagaaaattcgatgctttacatttaaaaagattcgattgactaaatgttttactctttatatttaaatgttatatgtaacaaaaaatgattttgagtaataaacatgttacaaatattacattctttttaaattgcaatccacatacctaattcattaacgttaatgtgttaagatgataaaaaatgagtaaggaaatgtgggtaaggggatgacagtaaaaaatttatttttaggctttgttgctgtaatattaaccgtttgtttaattggtttattaatattagcaacaaatgaagatgcgcttgctaaggtacataaaacaattaatacgcttaacgcgataaatgtatcaactgaagatacttataaaaagaaaatggatattctcaatattcatactgctaaagcatctgaagtgaatgaaaatgtgaaaaagcaaaatcattttaaacatcgtgtgaatgcaaataaatcaaattcttttaacgaacaagagtgccaagttattgctgatcgttatgcagataagcatatcaatgataattatggtttagaaagaatttctaagacaaatcatggatataattatgtgtattccaatgataattcaactagtaagcaacatgtaagtatttcaaatcaaggcataataacgaaataatagatggaacagtgtattctaattggatatactgtttttattttgcaataatttaatttaaaaaggtgaattcaacttataaaatgatgtaaatgttatgtcaaaatcaaccaatccgtaatgtattttaaaatgttaatatagttctgaagaagtataaatgaggtgttgaaatggctaaaaataagaaaacgaacgcgatgcgtatgcttgatcgtgcaaaaattaaatacgaagttcatagctttgaggtaccagaagaacatttatctggtcaagaagtcgcagaactcatacaagcaaatgttaaaacagtatttaaaacgcttgttctagaaaatacaaaacatgaacattttgtatttgttatcccagtaagtgaaactttagatatgaaaaaggcagctgctttggttggagagaagaaattgcagcttatgcctttagataatttgaaaaatgtaacgggatacattcgtggtgggtgttcgcctgttggtatgaaaacattgtttccaacagtcgttgacaaatcgtgtgaaaattatagtcatatcagtgtgagtggtgggcttcgaacaatgcaaatcacaatagctgttgaggatttgattacaataactaaaggcaaaattggagcagttatccatgaatgattaataacaacaaaaagtatggggcaagattaggagtgtgacagagatgaaatttttataaaattcatttctgccacactcctttttgattgaattagcattttacgatcataaacagtcattataattgagtatttgaacataaaaatgtaattttatcgtcacaatttgagtgtttgtgattgtttttggtaatttatgattgaaaagtgaaagcgtactcattataatacaaagtgagatggggtgatgatgataattactgaaaaaagacacgagttaatattagaagaactttcgcacaaagattttttgactttacaagaattaatagatcgaactggttgcagtgcttcaacaatacgaagagatttatctaaactacaacaattagggaaattgcaacgtgtgcatggtggtgcaatgttaaaagaaaatcgtatggttgaggcgaatttaactgaaaaattagcaacgaatcttgatgaaaagaaaatgattgctaaaatagcagctaatcaaatcaacgataatgaatgcttatttatcgatgctggttcatctacattggagctaattaaatatattcaagcgaaagatatcattgtggtaaccaatggtttaacacatgtagaagctttacttaaaaaaggtattaaaacaattatgctaggtggtcaagttaaagaaaatacacttgctacgattggttctagtgctatggagatattaagacgatattgtttcgataaagcttttatcgggatgaatggattagatattgaacttggattaactactcccgatgagcaagaggcattagttaaacaaacagcaatgtcattagccaatcaatcatttgtacttatagatcattctaagtttaataaagtatattttgctcgtgtacctttgctagaaagtacgacaatcatcacatctgaaaaagcattaaatcaagaatcgttaaaagaataccaacaaaagtatcactttataggagggactttatgatttatacagtgactttcaatccttcaattgactatgtcatttttacgaatgattttaaaattgatggtttgaacagagcaacagcaacatataaattcgctggggggaaaggtattaatgtctcgcgcgtcttaaagacattggatgttgagtcaactgccttgggatttgcaggtggatttcctgggaaattcattatagatacattaaataacagtgcaattcaatcgaattttattgaagttgatgaagatacacgtattaatgtgaaattaaaaacaggacaagaaacagaaatcaatgcaccgggtcctcatataacgtcaacacaatttgaacaactgttacaacaaattaaaaatacaacaagcgaagatatagttattgttgctggaagtgtaccaagtagtattccaagcgatgcgtatgcgcaaattgcacaaattacagcacagacaggtgctaaattagtagtcgacgctgaaaaagaattggctgaaagcgttttaccatatcatccactatttattaaacctaataaagatgaattagaagtgatgtttaatacaacagtgaactcagacacagatgttattaaatatggtcgtttgttagttgataaaggtgcgcaatctgttattgtctcgcttggcggtgatggtgctatttatattgataaagaaatcagtattaaagcagttaatccacaagggaaagtggttaatacagttggctctggtgatagtacagttgcaggcatggtggctggaattgcttcaggtttaacgattgaaaaagcattccaacaagcagtcgcatgcggtactgccacggcatttgatgaggacttagcaacacgggacgctatagaaaaaataaaatcacaagttacgattagcgtacttgatggggagtgaaaataatgagagtaacagagttattaacaaaagatacaatagcaatggatttaatggcaaatgacaaaaatggtgttattgatgagttagtaaatcaattagacaaagcaggtaaattaagtgatgtcgcgtcatttaaggaagcgattcacaatcgagaatcacaaagtacaactggtatcggcgaaggtattgccattccacatgccaaagtggccgcagttaagtcaccagctattgcgtttggtaaatctaaagcaggcgtagattatcaaagtttggatatgcaaccagcacacttattctttatgattgcagcgccagaaggtggcgcccaaacacatctagatgctttagctaagttgtctggtattttaatggatgaaaatgtacgtgagaaattattacatgcttcatcacctgaagaagtactagcgatcatagatgaggctgatgatgaagtgacaaaagaagaagaggcagaagctgaagcacaacaagttgcaactgcagaacaatcatctaaacaatctaatgagccatatgtgttagcagtaactgcttgtccaacaggtattgcacacacatatatggcacgtgatgcattgaaaaagcaagcggataaaatgggtattaaaattaaagtagaaacgaatggttcaagcggcattaaaaaccatttaactgaacaagatattgaaaatgcaacaggtatcattgttgctgctgatgttcatgttgagacggatcgcttcgatggtaaaaatgtcgtagaagtaccagtagcagatggtattaaacgcccagaagaattaattaataaagcattagatacaagtcgtaaaccttttgttgcccgtgatggtcaaagaaaaggtaactcaaatgacagtcaagaaaaattaagcccaggtaaagcattctataaacacttaatgaacggtgtttctaacatgttgccacttgtaatatctggtggtattttaatggcaattgtatttttatttggagcaaattcatttaatccaaaaagctcagagtacaatgcgtttgcagagcagctttggaacattggtagtaaaagtgcattcgcgttaatcattccaattttatctggattcattgcacgtagtattgcggataaacctggtttcgcttcaggtcttgtaggtggtatgttagcaatttcaggtggttcaggatttattggtggtattattgcaggtttcttagcaggttacttaacacaaggtgttaaagccatgacacgtaagttaccacaagcattagagggattaaagccaacattaatttatccactattaacagtgacggctacaggcttattgatgatttatgcctttaatccaccagcatcttggttaaatcatttgttattagatggattaaacaatttatcaggttctaatattgtattattaggtttagttattggcgctatgatggcgattgatatgggcggtccattcaacaaagcggcatatgtttttgcaacaggtgcgttgattgaaggtaatgcagcaccaattacagctgcaatgattggtggtatgattccaccgttagcaattgcgacagcgatgttaatttttagacgtaaatttacaaaagaacaacgtggttcaattatccctaactatgtgatgggtatgtcatttattacagaaggtgcgattccatttgcagctgccgatccattacgtgttattccttcaatgatgattggttcaggtataggtggcgcaattgctttaggcttaggttcacgaattactgcgccacatggtggtattattgtaattgttggtactgatggtgcacacttacttcaaactcttattgcacttctagttggcacattagtttcagcattaatttacggtttaatcaaaccaaagttaactgaaacagaaatcgaagcttcaaaatcaatggacgagtagttttaatgatgtaaaatgattgttagcaaagagcttcatattaagttgtatgttcaatgaatatatgttagttttatatatcgtgttaacggtagcttatacaaagctgtaaaaacactttctattaattcagtttttatgaattgatatgaaagtgtttttatttttagataaatgaatgaagaaatagacaccacaaatgtatagacttttttaatattttgcaaaaagttatgccaaacgaagcagatatagtaaaatatgagtgtcttaaagtgaaaatttataaataaagaagggtttatacgtgtcagaattaattatatataacggcaaagtttatactgaagatggcaaaatcgataatggttacattcatgtgaaagatggacagattgttgcaattggagaagtggatgataaagcagcaattgataatgatacgacaaataaaattcaagtgattgatgctaaaggtcatcatgtattaccaggttttattgatatacatattcatggtggttatggtcaagatgcaatggatgggtcatacgatggcttaaaatatctatccgaaaatttgttgtctgaagggacgacatcatacttggccactacaatgacgcaatcgactgataaaatagataatgcacttacaaatattgctaaatatgaagcggagcaagatgttcacaatgcagcggaaattgtaggtatacatttagaaggaccatttatatctgaaaataaagttggtgctcaacatccgcaatacgttgtacgcccatttatcgataaaattaaacattttcaagagactgctaacggattaataaagattatgacgtttgcacctgaagttgaaggtgcaaaagaagcgcttgaaacgtataaagatgacattattttttcaattggtcatacagtagcaacatacgaagaagcagttgaagctgttgagcgaggagctaaacatgtcacgcatttatataatgcagcgacgccattccaacatagagaaccaggtgtttttggagcagcatggttgaatgatgctctacataccgaaatgattgttgatggcactcattctcatccggcatcggttgcaattgcttaccgtatgaaaggtaatgaacgtttttatttaattaccgatgcaatgcgtgcaaaaggtatgcctgaaggagaatatgatttgggtggacaaaaagtaactgttcaatcgcaacaagcacgtcttgcaaatggtgcgcttgctggtagtattttaaaaatgaatcatgggttacgtaacttaatatcatttacaggtgatacattagatcatttatggcgagtaacaagtttaaatcaagccattgcattaggtatcgatgatagaaaaggtagtattaaagtaaataaggatgcagatcttgttattctagatgatgatatgaatgtaaaatctacaataaaacaaggcaaggttcacacatttagctaataaataatcataattaaatgtatgcaatagatttaatctgttaacataagcactttatattatgataaaatagaagcaataacatttttttctgggggtgtctaaatgggaaggcgataacatgtagttgtaatttaagtcatagtgataaatttgaatgcgtgttacccatgagtgacacatataacatggaggtgaatccctagaaatagggaattaattggaaacttcgaccataattagtttgattatatttattctattaattgcattaaccactgtatttgttggttcagaatttgcattagtaaaaattagagcaacaagaattgaacagctagcagatgaaggaaataaacctgctaaaatagtaaaaaagatgattgctaatctagattattatctttctgcttgtcagttaggtataacagtaacatctttagggttaggttggcttggtgaaccaacgtttgaaaagctattacacccaatatttgaagcaatcaatttaccaactgcattaacgacgacgatttcgtttgcagtgtcatttataatcgttacgtatttgcatgtagtacttggtgaattagcgcctaaatctatagctattcaacatactgaaaagcttgctttagtatatgcaagaccattgttctatttcggtaacattatgaaaccattgatttggctgatgaatggttctgcacgtgttattattagaatgtttggtgtaaatcctgatgcccaaactgatgcaatgtcagaagaagaaatcaaaattattattaacaatagttataatggtggagaaatcaaccaaactgaattggcatatatgcaaaatatcttttcattcgatgaaagacatgcaaaagatataatggtacctagaactcaaatgattacactaaatgaaccttttaatgtagacgaattactagaaacaataaaagaacatcaatttacgcgttatccaattactgatgatggtgataaagaccacattaaaggatttattaacgtcaaagaatttttaactgaatacgcttctggaaaaacgattaaaatagcaaactatatacatgagttgccaatgatttcagagacaacacgtatcagtgatgcattaattagaatgcaacgtgaacatgtacatatgagtcttattatagatgaatatggtggaacggcaggtattttaacgatggaagatattttagaagaaatcgttggagaaattcgtgatgaatttgatgatgatgaagtgaatgatatcgttaaaattgataataagacattccaagtaaatggcagagtactattggatgatttaactgaagagttcggtatagaatttgatgactctgaggatattgatacgataggtggatggttacaatctcgtaataccaatttacaaaaagatgattacgtggatacaacttatgatcgctgggttgtttcagaaatcgataaccaccaaattatttgggtgatattaaactatgaatttaatgaagcgagacctactatcggacagtctgatgaagatgaaaaatcagaatagatattaatatataaaccaactaagaatgatttaattcatttttggttggttatttttttgactaaaattaatgaaaagtgaaaatagtattggaactcaatatctttaatgatttaatgaataatttttattgaaagcgataattcgtattaattgagtttgttgaaaaatttagggtaatgtaaagatataaaagatacatagattggagagatataaagatgttgaatgagatacaaatattaaataatggatacccgatgccttcagttgggttaggtgtttataaaatctctgacgaagatatgactaaagttgtaaatgctgcaattgacgcaggctatagagcgtttgatacagcatacttttatgataatgaggcttcactaggacgagcattaaaggataatggcgtcgatagagaagatttgtttataacaacgaagttatggaatgactatcaaggttatgagaaaacattcgaatatttcaacaaatcgattgaaaatttacaaactgattatcttgatttatttctaatacattggccttgtgaagcagatggtctatttttagaaacatataaagctatggaagaactttacgagcaaggtaaggtaaaagcaataggtgtatgtaattttaatgttcatcatctagaaaaattaatggctcaatcaagtatcaaaccaatggtgaatcaaattgaggtacatccatattttaaccaacaagaattacaagaattttgtgatcgtcacgatattaaagtgactgcatggatgcctttgatgagaaatagaggactactagacgaccctgtcattgttaaaattgctgaaaaatatcataaaacaccagcacaagttgtattacgttggcatttagcacacaatagaattattattccaaaatctcagacacctaaacgcattcaagaaaatatagatattttagattttaatttagaattaacagaagtagctgaaattgatgctttaaatagaaatgcaagacaaggtaaaaatccagatgatgtgaaaattggggatttaaaataactggatgttaaattttacgtttatgaatgccttttaatgtgtacattaaaataaatgagttggtttttactatttgataaaacaatactcaggtacattcaaaatcttttaaataaaaaggatggacatagatgaaaattagagtcgtcattccttgttttaatgaaggggaagtcattacacaaacacatcaacaattaactgaaatactttcacaagatagtagtgtgaaaggctatgattataatatgcttttcatagatgatggtagtacggataccactatagatgaaatgcaacatcttgccacaatagataggcatgtcagctttatttcttttagtagaaattttggaaaagaagcagctatgattgcaggttaccagcatagtactgaatttgatgcagtcatcatgatagattgtgatttgcaacatccacctgaatatattccgaaaatggttgaaggttttatggaaggctatgatcaagtgattgcaaagcgtgatagaagtggtgaaaattttagtcgcaaaacattaagccatttgtattataagttagttaattgctttgtagaagaagtacaatttgatgatggtgttggtgattttagacttttaagccaaagagctgttaaatccattgcatcacttgaagaatataatcgattttcaaaagggttatttgaatggataggctataatactaaagtgtttacgtatcaaaatgttgagagacaaaaaggggaatctaagtggtcctttaaaaagttatttaattatggtattgatggattgatttcctttaatagtaaacctttgagaatgatgatttatcttggcttgtttatcttttcaataagcgtgttatatattatctatttattcatcaatattatgatatctggtgttaatattccgggatatttttcaacgattgcagctattttattattaggcggcatacagttaatttcaattggtgttgtaggtgaatatattggcaggatatattatgaagttaaggcacgtcctaaatatattattcaagctacaaatctttcaagtcttgaaaatgatgagaaggatacccataaagtttattctaaataaacaaaaaaagaagccctcattaatgggagcttctttttagtctttgcattttattttataaataaatcggattatgacgtaatgtctaatttgtgtaatgttacagtcatcgtagttcctacatctatatcactgcttacactgatttttgcgttattttgttgcgcgagttcattagctatatataagcctaatccagaaccacccgtttttgtattacgagagttttctactctgaatgtacgttcgaatatacgttcttgtagttctggtataatgccaataccttcatcgctaatagcaatgtcgatagtatcttgatcttcgttttcactaatattaatatcaatgcgactaccaacatttgaaaattttagcgcattatcaagtaagtttgttaaaatacgctcaagtggcgttcgatattgataaaatgcatcaatttcgttacagaaattcacttctaatgtgcggttttcatgtttgatacgttgctcatatggttgcaatattgatacaagtaattggtctagttgtattaattctgggggatatgttttacctgtatttaaagtgataatatgagtcatatcatcaaataatgttgataatctgtttgcttgtttaattaatatgtcgtatgactctttaatctcatgatccttagtgattataccatcacgtagtccttcagaatatgaaataatgcttgctaaaggtgtttttaaatcatgggctaagttttgaatcagttctgttttttcttgttgttcggatttaatttgattcatttgttgcgtaatttcagaagccattttattaaaagattgatttaattcataaatttcttttggtgaattaaacgttttatcattgcttgcgtaatttccgttagcaaattgcttagtttttatattaaactgcttaattttttgtataagtggattaataaaaatactacatattaataaggttaaacagcttgtaattattgtcgttaaggtcaaagttagtgtcatatggccgttaaaccacattaaaatatatgcaattgctaaaatagttgaagttaatagtatactcgatacgacgccaataatgatttgacttctaattgataacaccattatcggctcctttcaaatttatatcctaatccccatacagttgtgatggtatatgttgtaaagctctctttttctaatttttctctaatacggtgtatatggacattcacggtattagcatcttcgtaatagtcatatccccaaactttttcaagtaattctgatttagaaataacttcattttctctagaagctaaataccacaataactcaaattccttaatacgcatagggacttcgtgaccatttacagtcacaactttacttaagttaataagtgttaattcatcaaacgacagttgttcaactggttgatgatggtatttcttcattcttgtaagtaaattattaatacgtaaaacgagttcccttggactaaatggttttttgacatagtcatctgcacctaaagttaaggcgtaaatggtatcatgttcttgtgttttggcagttaaatagataaaggggatatctaatttttgccttttcatttctttgacaatgtcgtaaccattaacttctggcatcatgatatcaagtaccatgatatcaatatcatttgatagtaaagaaattgcttctttaccgctagttgtcgttgttactttgtaaccttcatattcaaaataggtttgacaaatgtctacaatgtcttgttcatcatccacgatcagtaagtgggtcatctattttttcacctctgttcttacgacctctaaagtaattaatgatttctttaagtgaaatctgttttaacaatgagtgactcattagtaaaaggataaagaaagttaattgaagaggatacgtaaatatcatatctgctaagatataatttatcataacaaaggctccaaagaaactagcagcatatgcaaaaactccaaaaattaaacctaatccaattgcaatctctccgagtgggacaacaatatcaaataatgacgtcgtatgtgcaactatatttgcgaaaaaccacttataccactctggtgaatcagtattgttagcgatgactggtactaaacctttcagcgtaaatccgcccgttaatttttcgtagccttgcattaacataacaatacctgaacccacacgaatgataaatgtaacgagtagcaataatttattcatgatgttcacattctttctatttattgtgtgtaatttatataaacataagattaagcaacataatgcgatttgtagtgttatgtgaacaggaagtgtttgagctcatgggttgcttaagctaaacaaacctcaagctctaaaaaaatttacttatgtgctctgcaatcttatgggatttaatagttgtatatatattgaaaaaaggaaagtatgatttctacaagctaggggggctgtgaaatcatacgctttccattgagtaatgagtgtaatgtatattttaaaaatttgtaatgtatagtaatagtatgttgtaaataaaagtttaactcagaaattgattattttaatttagcgccgccgaagatgacgtgagcttttttacaatagattgttacttcatcatatttgcttaaatctacatttttaagatcaaatgtttgtttttctttatcgtagtcaaccattgcgatttctttaccgtttttaatgtcgccattttttgttaggtagacgtataaatctggaccttttgatgatttgtagttagtaagcattaatttaccatttttaatctcagctttaccttcaacagtttcaccgtttttagaactgaatgtacctgttaggtgttttgttttatcagttttaacattgctatcttctgactttgttttttgttcagttttgttaccttgatcttgtgaattagaattaccacaagcacctaaagctaatgttgtgataacagcaccagctgctaaaaaatattttgtattcatgctaactcctcatttcttcaatttgataagttaagtttaaaatgaaggcaaataatatgccattaactaattcttaacttcgtttaaatatcgcttaactaatattgaagaaagaataatttgaaaatgaaaataattgtctgatttaaataaataggggtcaaaataagaggagggcgtttttttaagtaaggaaatatttatctgaactagataacactataaaacacttctgatattttgaactaagaatatcagaagtgtttaatagttttggtattaaaatttataaaccttttgccacaataaaaacaacaagaaaataagatagacgattaaatacaagtaccaatatggtgttaaaaccatcataacgataaatgaaatgttaataatgataagtcctttaatcattagtttctttattttgttattattttcagcagtttcatctaagctattaaatgttgaaataaacaacataataccaccaatgatgaaaatggcaggggctaaaaatggaatagacatatatattgattgtgtacttgaaaagtcggtaacacgttgcgttaaactgacaacaatcgttaatatgatagcaataaatttttggtctgtaatgtatacaggttttaattttttatcaatgtaaaactgtagtatcgtccaaatgataaacatcgttatagtacacagagtaataaagttatatttatcaattatgaatgtatttataaaggcgtttatcgtaatagataacaacattgcacttaatgataaatgttgcatttgatgcctatataaattgaatccagttataagtacgacgatagcaatattaattaatatatatacaatcatgatggactcctgttcgttatacttcaatcaactattatatcaattaatatattgttattcattagatatgacttgcaaaaagtaaaataagttatcctttatacaccttttttattgctccaaagtaatgtatgaagttgtggtaacacataaacgtgattcatatcattactttgcataactaaatccaccaactgctcgtagcgttctaacaacttttcggtatgattatctacgctgtctgataaatatgggttaccaacttgtaaatagaagggaatatctggataacggtggtgtatcattttggcaaaatcataatctttatcgtcgaatacaactacttttaagtttaatgatgaaggtacgcattgtgtaatcacttcatctaacttttttaaatcaggtgtcatagttgaacttggtggttttggactaatcgttaaatcatcaatttgtgtcatccaaggttggaatttactgccttgtgtctccagtgcgctgaaaatacctttatcttgaaataagtcaactaactcttggatacctttaattaatgctgggttaccaccagaaattgtaacgtggttaaataaatcgccaccaattcgttttaattcatcataaatttcttcagcggtcatgagttttatatcgcctttagcactaccatcccaagtaaatgcagaatcacaccagctacagcgataatcacatccagctgttctcacaaacatcgtttttctaccgattactcgaccttcaccctgaatggttggaccgaatatttcgagtacaggaattttagccattagttacacctgttcctttggtctaaatacgacataacttgttggtgtttctcttacaaatacttgaatacattttggttggtgttcgagcgatgccaaattttctttaacaatttgataaattgtttccgctacgatttcagttgaagggattttgtttttaaaagcaggtaagttatttaacagttgatggtcaaatttaccgtgtatcatctttttcaaatggctaaagttcactaagaagccagtgtcatctagtttatcaccgacaattgttaaattaacaaagtaagtatgaccatggacattttgacaaatacctgcttcttcacatggaatgtgatgtgcagccgaaaaattaaaatctttatttaattcgaattgatatggatgcgttgtactaggatagatttgttgtaacattttaaagcgctcctttactttcaagatattgatttagtccacgttgacgtaaatgacaagctggacattcaccacagccatccccaatgataccgttatagcatgttaatgtttttgtacgaatataatctaaaacttcgagttcatcacttaatttccacgtttctgctttgtttaaccacattaaaggagtatgaatgacaaaatctttgtccatagctaggcttaatgttacgttcattgattttataaaactatcgcgacagtctgggtagcctgaaaagtctgtttcacatacgcctgtaataatatgcttagccccaatttgataagctagagcgcctgcaaacgacaagaaaagtaaatttctagctggaacaaatgtattaggtataccatcttcattattagtaatttccatatcatgttgtgttaatgcgtttggagtaagttgtgataataatgacatatctaaaacgtgatgtttcattccttgatcttgtgcaatttgttttgcgacttcaatttcagtatcatgtctttggccataattaaacgttacgagttcaacttctttgaaatgtttttttgcataaaagagacatgttgtactgtcttgaccaccactaaagacaacgatggctttttcattatttaatacactttccattttgtaattgctcctatcattaataatattaataaagaggttaatggcattgataagcccgtttttaatttataaaataaaaaaaggggctgacccattagtcccttttgaaccaaaaaatcgaaggcacccgtgaaagatgtcttcgatttttgttttttttggatgaaatatagaggattttccccctatatttggttttgtatgattgtttttccctcatatttccttactctagttactaatttcctaaaattgtgcgcaagaaatacaagtcccatttccttaaaaattttttcagctcctcggacatggaatcttttaaatttcatattttgtttaatgtttccaaaaactgtttcgacatctatctttcgctgcgcatagtatgaggctgtttctttgctttctatcttttcattcgcttttatttttatatattcccaggttggattaatattcaaacgtcgattttttccttcttttgctttggtacatttctctctcaatggacatcctgtacaatcttcacattcatagattttgaagtttcgaataaatccatttctatctttacgttgtgaataatgtgagaacactactcttttctgattgggacaaatatagtaatcatccaactcgttgtaagtccaattatctcgatgaaactgattttgtttatgggcgcgtttcttctcttttaagtaaccttgatgcggaatgatgggggtggattctgtttcgtctaacacataacaataattttcttcacttgcataaccggcatctgcgacaatattttctggtaaacctatttttgattcaatcttttcaagaaatgggataaatgttcgtgtatctgttggatttggataacaatcataagcaagagcaaattgattttctgtcgcaagttgaatattataacctggttttagttggccattaagcatgtgatcttctttcattcgcataaaagtagcgtcatgatccgtctttgagaaactattgcgtacacccataatcactaattgttcttcgtagctcatttttctttgggcaaaatcatcgaatcgcttcttctgcttatgaacttcagatttttctttacgaagtaattttcgttcttctactgtttcggtttggtcaatcgcttcaattaattgattttccttttcttccaaagattgacgaatcctttcaatctcttctatagaaagttcatcctttaaatcatctattaactcaggtaagatttttgtttccaccatttgttggtagttttcaagggctttttgatcaaggctatccttatactttaaaatactttttttccaaacgaaagagtatttattcgcatccgcttcaatttttgtaccatcaatgtatagagcactgccactgattaagccactttgaaccagtagctcacgaaattgaacaaatgaatgatctagaatatcgttcataatcggatgaacgcgaaaacgattaatagtacgaaagttagggaattgctcttgagataagtagcgcatccgaatactatctatcagcatattttgtatttggcggcccgaataaaccccttgaatataggcacaaagaataatggaaagtagcatacgaggatgatattggggtctacccatagattgataataaggaagaaagacttcatcgggaatagagtcaacaaactgcacaatggcatgagcaaaatcattttcttctaatttaatttcaagatctataggcaaacaaagttggtttatggtataattttgatacatgataaagcacctctctcaaatggattaatcacctatattatagcagagtgtgctttatttttgtattcactttcaaaagataaatagaggagctacttttgggtcagccccataatatatattaaaggtttaccaacgaatgtttgaaatttcaatgtctagttttttatagagggtttcagctaggaacctctgatattcatttatgtacgatgaatagaatataccatatattagttaaaatcaaggtcaggataatgacaatgcttttaaagttttagctacatccaatacatattataaaaataaaacacatttagaacggagtatacaatgattctagtcatagataataatgattcatttacatataatttaatagactatattaagactcaaacgaaactaacagttcaagttgttggtattgataatctgctgatagaagacgtcattaatatgaagccaaaagcaattgttatttcgcctgggccgggtaatccggatgattatcctatcttgaatgaagtgttagaacaattttatcagcgtgtacctatactaggtgtatgtttaggatttcaatgtatcgtgtcttattttggtggaaatatcattcacggctatcatcctgtacacggacatactacacagttacgccataccaatgaaggtatttttcaaggactgcctcaaaatttcaatgtaatgcgttatcattcattaattgctgacggagcgacttttccaaattgcttaaagattacagcaaaaaacgatgaagcgattattatggcatttgagcatattagatttccggtttttggtgtgcaatatcatcctgaatctattttgagtgaatacggttatcgacaagttgaattatttttatcgaaggtaggtgattactgtgagaatagaatataattatcgctactatttaactgaaaatgaatataagcaataccatattcaattaaagggatttataaagaagtatgttgctactaagttggctgatgtgggagaagtgatacactttgcacaagcgcagcaacgacaaggtagatatgtctcgttatatttaagttacgaagcggcaaagtattttaatcatgctatgtgtacacattcattagctaaagatgatatttatgcagcagcttatagttttgaaaaagcggaaagcataaattcaacatatgaacatcaaacttcttatgtatcaaagtatcatttttcatttgttgaatcttctgaggttatgatgactaatattaaacgtgtccaacaagcaattgttgaaggcgaaacgtatcaagtgaactatacggcgcgcttaacggataacatttattatcctattagtactttatatgaacgattaactcaatttagtaatggtaattatactgcgttattacaaactgatgaaatccaagtagcgtctatctcaccagaattattttttcaaaaaggacaatttaacaatgtcgataacgttatcataagcaaaccgatgaaagggacaatgcctagaggtaaaacggaagctgaagatcaacagtattataaaacattgcaaacttcttcgaaagatcgtgcagaaaatgtcatgattgttgatttactaagaaacgatatagggagaatatcacagagtggctcaattaaggtgtataaactattttttattgaggcatataaaactgtatttcaaatgacttcgatggtaagtggaactttaaaaaataatacagacttaactcaaattttaacatcgttatttccttgtggttcgattacaggtgcaccgaaactgaatacaatgaaatatattaaacaattagaaagttcacctcgtggtatatactgcggagcaattggactattacttccaactgaagatgataaaatgatttttaatattccgattcgcactattgagtataaatatggacaagcgatttatggagtcggagcaggtattacaattgattctaagccaaaagatgaagtgaatgaattttacgcaaaaaccaagattttggagatgttataatgcaattatttgaaacaatgaaaattgataatggacatatccctagacttacttatcatactaatcgcataaaatgttcttctgagcgattaaactttaaatttgatgaacatgcatggcgaaatgaattaaacgatgtaacaacaaagtatcacagtggtcaatatagacttaaaatcgtattaaatgctgaaagcaaatttgaaacgatagtgtcacctttacctgagaaaagtagttttacagcaaaatttcaagtgttgcccaaagtagttaatccaacttttataaaaaataaaacgacagaacgaaagcatttagcacacaatcatgaaacagatttaatattgctaacttcagaggacggcaaggtccttgaatttgatattggcaacattgtcattgaagaggatggaaaatggtacacaccaagttataaagatgatttcttaaaaggatgcatgcgtgattatttaatagatagtgacaaacttgttgaaaaagactttaataaaaacgaattgatttataaatatcataacaatgagatacgtttatttttgataaatagtttacgagaggttgccgatgtccacctttgcctttaaaattagtatgataataaagtagaaaatgatgtgaaaacaaatttaaaaattaaatggggccaaatatgattattgtttatattgtgctgttgttaattcttgtatacgtaaattatcgattagtgaatcgattgctatctgaaaatagaatatatgttgttcgtttgatagcaacaattactactgttataagctttatccttgtatacgcattaattcacgaacttatgccttttgttgtgcgggcaatggatttaatgtaccaccagtaaatttagtgagtaggtaaaatgaactattcaatcgattctataattaaaaatgaaagtaaagtaaccaaatattgaagaggtgtacaaatgaaaatatatagtcaaggtgaccaagccattgtagtcgcaattgaaaaagaagtatctaaaagtttaaccgaagatttattaacacttcgctcatatttaattgaacaaaattatccatttattatagaaattgtgccatcagaatcagacatgatgattgtctatgacgcaagggatatgattaaacaccataatatacaatcaccttttttatacatgaaagcactaatagaatcgattcatttaaacataaaacatgattttaaccagcaagatttgattgaaataccaattgtgtatggttcgaaatatggtccggatttagaatcacttttaaaacattacaaaatcaagctagaaacttttattgaattacattctaaggcgcaatattttgtttcgatgatgggatattcacctgggtttccttatttaactggattaaataagaaattgtatattaatcacacgagtaaacagaaaaaattcattccagctggttctgtagtacttgaagggaaaaaatgcggtattgtaactacggatacaattaatgattggttagttattggttatacaccattatcactttttaatccgaaagaatcagatttcgcacgcttaaagttaggcgataatattaaatttagacctatcaatgaaaatgaattagaagtaggagcgtttaaagatgtcaatcataattgaaaaaagtggcttattcagtagctttcaggactttggcagaaggggatatgaacatgatggtgtaattccatgtggtgcacttgatactttagcacatgaaattgctaatcgattagttgcaaatgacaagaatgaagcaactttggaaatgactaataaaatggcaacgattcgttttacagaacctacgctgattgcattagcagggggtaatgtcaaagcttacactgagcatatgactatatctccatataaattgtatttgttagataaaggcgatgttttaaagtttagagaaacaagttatacatcgcgagtgtatttagctgtgggaggcggatttgaattagatgcatggttaggatctaactcaaccgactttaatgtaaaaattggtggttttaaaggtagaacattacaagatggcgatgaaataaagcttaagagagattatacagctcgtcatcataagttatttgaaaaccttgctcacacgaaacaaacagattggggtattgatggatacgccttgtcatttaattatatgtctgatgtatttcatgtcgttaaaaataaaggtacggaagattttaaagaagatgccattcaaagatttgtgaaacatgattataaagtaacgagcaaagcaaatcgcatggggatgatgcttgaaggtgaaaaaatcaaagctttttatgaagatatgccaccgtatcagactgtcaaaaaaggaacgatacaaattaagcgtgatggcacacctattatcctattaaatgatcattatacgctaggtagctacccgcaaatcggtacaatcgcaagttatcatttaacgaaattagcacaaaaaccgcaaggatcacgtttgaaatttcaatttatagatattttaacggctgaaaagaaccttgttaagtatagtaactggttaaaccaattattccatggaatagaatatagaatgcaattagaaatgatgaaataatatttggtacgtagctcatactcgagtccgatgcaaataatttcctcctaatgtataatgaaataatactgtgttttatctgcgaaatgtatcattttctaattcgtttcacagtaaaatgaaaagataaagtgtgtttttacttgaattttgactaaaattactctatatttattaattgagctatgcttattattacaatttgattacaaattttaaatttgttaattgaatgataatattaaataaagaaacttacacaagcaaatatgagttgtagcccaaaatacttgttaaatcaaagttgaaagctacaaataacgaaaattataaacttgaatctgaaagtaattactataattatgacaatgttaacttttaaacgcacttattaattaactacataatgttaatatctaatttattcaagtactttcgcaagatttattatctaaataacgggggaaagaatcatgagttcacaaaaaaagaaaattagtctttttgcgttcttcttattaaccgtaataacgattaccttgaagacgtatttttcttattatgttgatttttctttaggtgttaaaggtttagtacaaaacttaatattattgatgaatccttatagtttagtagcactggttttaagtgtgttcctattctttaaaggcaaaaaagcattttggttcatgttcataggcggcttcttattgacgttcctattatatgccaatgttgtgtactttagattcttctctgattttttaacgtttagtactttaaaccaagtaggtaacgtagaatctatgggtggtgcggttagtgcatcattcaaatggtatgactttgtttatttcattgatacgttagtttacttattcattttaatatttaaaacaaaatggttagacacaaaagcatttagtaagaaatttgttcctgtcgtaatggcggcttcagtagcattattcttcttaaacttagcttttgctgaaactgacagaccagaattattaacacgtacatttgaccataaatatttagtgaaatatttaggaccttataactttacagtatacgatggtgttaaaactatcgaaaataatcaacaaaaagcgctagcatctgaagatgacttaacaaaagtattaaattatacgaaacaacgtcaaacagagcctaacccagaatattatggggtggcaaagaagaaaaatattattaagattcatttagaaagtttccaaaccttcttaattaataaaaaggttaatggtaaagaagtaacaccgtttttaaacaaattatcaagtgggaaagagcaattcacatacttccctaactttttccatcaaacaggtcaaggtaaaacatctgactctgaatttacaatggataacagtttatacggtttaccgcaaggttctgccttttcattaaaaggagataatacgtatcagtcattaccagcaattttagatcaaaagcaaggctacaaatctgatgtcatgcacggtgactataaaacattctggaacagagaccaagtatataaacactttggtatcgataaattctatgatgcaacatactatgacatgtcagataaaaacgttgtaaacttaggcttgaaagacaaaattttctttaaagattctgctaattatcaagctaagatgaaatcaccattctattctcatttaattacattgactaaccactatccattcacattagatgaaaaggatgcaactattgagaaatcaaacacaggtgatgcaacagttgatggttatattcaaacagcacgttatttagacgaagcattagaagaatatattaatgacttgaagaaaaaaggattatatgacaattcagtgattatgatttatggtgaccactatggtatctctgaaaaccataacaatgccatggaaaaactattaggtgaaaaaatcacaccggctaaatttacagatttaaacagaactggtttctggattaaaatccctggtaaatctggtggtatcaataatgaatatgctggtcaagtcgatgtaatgccaacaattttacatttggctggtatagatacgaagaactatttaatgttcggtactgatttattctctaaaggtcataatcaagtagttccattcagaaatggtgactttataacaaaagattataaatatgttaatggtaagatttattctaataaaaataatgaactcataactactcaaccagctgatttcgaaaagaataaaaagcaagttgaaaaggatctcgaaatgagtgacaacgtgcttaatggtgatttgtttagattctacaaaaatccagacttcaaaaaggtaaatccttcgaagtataaatatgaaacaggacctaaagcaaactctaaaaaataatatctaaacacgaactcggattgataaaatatcaatccgggtttttattatgttcttttatattatgttttacattatatgtgttgataaaaaggtatattataaagatcattagcatagtcatcaaagccttaacaagttttatttatagttgaagcaacaatatattaaattatgacacttaacggtatcgatttcttttgatttcaaaaaggtgtataatgtatagaactgatttaagtacgtagagatttcaacagaagaaggaagatgggtatggaagcatataaaattgaacatttaaataaatcttatgccgataagactatattcgataacctagatttatcaatttcagaaggtgaaaaaataggtttagtaggcataaatggtacagggaaaagtacgttgttaaaagtaattggtggtattgatgatgattttacagccaatgttatgcatccaaatcaatatcgaattcgatattcgtctcagaaacaggaccttaatgaagatatgacagtttttgatgcagtattaagttctgatacaacaactttacgcatcatcaagcaatatgagcaggcagtacaagcttatgcggatgaccaaagtgataaattgttcaagcgaatgatggatgcgcaagatgctatggatcaacatgatgcttgggactataacgctgaaattaaaacaatcctctcaaaactaggtatacatgatactactaaatacattaaagaattgtccggcggacaacaaaaacgtgttgtacttgctaaaacattaatagaacaaccagatttattgttattagatgaacctacgaaccatttagacttcgaatcaatcagctggttgatcaattatgtgaagcaatatcctcatactgttttattcgtaacccatgatcgatattttttaaatgaagtttccactagaattattgaactaaacagaggtaagttagcgtcatatcctggtaactatgaatcttatattgaaatgcgcgctgaaagagaagtaacacttcaaaagcaacaacaaaagcaacgagctttatataaggaagaacttgcttggatgagggctggagctaaggctcgtactacaaagcaacaagctagaattaatcgatttaatgacctagaaaatgaagttaaccagcaatataaagacgataaaggtgaattgaatcttgcttattcaagattaggtaagcaagtgttcgaattagaagacttatcaaaggctattaatgataaagtattatttgaacatctgacggaaattattcaaaaaggtgagcgtattggtgttgttgggccaaatggagctggtaaaacaacactcttaaatattttgagtggagaagaccaacaattcgaaggtaaattgaagactgggcagacggttaaagtagcttattttaagcaaacagatgagaccctggatagagatattcgtatgattgattatttaagagaagaaaatgagatcgcaaaagaaaaagatggaacctcggtatctattacacaacttcttgaacgatttttatttccaagtgcaactcatggtaaaaaagtttataaattatctggtggagagcaaaagcgtttgtatttattacgtctactcgtacaccagccaaatgttctgttgttagatgaaccgacaaatgatttagatactgagactttaacaatacttgaagattatattcatactttcggtggtacagtgattaccgtaagccatgatcgctatttcttaaataaagttgcacagtcatattggtttattcatgatggtcagatggaaaagattatcggaacttttgaagattatgaaagttataaaaaatcattagataaaaataaatccacattgaagcaacaatctaaatcttctacaactgtacgtaagaaaaatggtttatcatataaagaaaaattagaatatgaacaattgatgaaacgcatagaacaagcggaagtaagaatggaagaaattgatgtgctcatgattgaggcaagtgcagattatgggaaaattaaagaattaaacgaagaaaaagaacaacttgaaattcaatatgatttagacatcacaagatggagtgagttagaagaaattaaagaacaacaataaggggtcaatttatgatgcaacaaacattatcgcattactttgggtatgaaacgtttcgaccaggacaagaagaaattattagcaaagtattagaccatcgtaatgtgcttggtgtcttaccaactggtggaggtaagtctatatgctatcaagtaccaggtttattgttaggtggtacaacaattgtaataagtccactaatatcattaatgaaagatcaagtggatcaattaaaagcgatgggaattcaagctgcttttttaaatagtagtttgactcaaaaagagcaacaacgtattgaaaaagcattatcaaatggagaaattcaatttttgtatgttgcaccagaacgatttgaaaaccgatattttttaaatatgcttcagcgtataaagattcacttagtcgcgtttgatgaagcgcattgtatttctaaatggggtcatgatttcaggccgagttaccaaaatgttatttcaaaagtatttacgttacctcaagattttacaataatagcgttgacagcaactgccacggttgaagtacagcaagatattagagaaaagttaaatatcgctcaaactgatcaaattaaaacgagtactaagcgtagaaacttaatttttaaagtaaatcctacttatcaacgtcaaaaatttatattggattatattaaaacacacgatgaagatgcaggtattatttattgttctacacgtaagcaagttgaagagcttcaagaagccttagaaagtcagaaaattgaaagtgttatatatcatgcaggtttgagcaataaagaaagagaagaagcgcagaatgatttcttatttgatcgtgttaaagtagtcgttgctacaaatgcttttggtatgggtattgataaatccaatgtacgctttgttattcattataatatgcctggagatttagaatcttattatcaagaagcgggtcgtgcaggtcgtgacgggttgaaaagtgaatgtattttgttatttagcgaacgcgatatcaatttacacgagtattttataacagtctctcaagctgatgatgactataaagataaaatgggcgaaaagttaactaaaatgattcaatatacaaaaacaaaaaaatgtctagaagcaacaattgtccattattttgaaccgaatgaaaaattagaagaatgtgaacaatgtagtaattgtgttcaacaagataaatcatataatatgacacaagaagctaagatgattattagttgcatcgctcgtatgaaacaacaagagagttatagtgttatcattcaagtgttaagaggagagtcaacagattatattaagtataaaggttatgaccaaatttcaacccatggtttaatgaaaggttacacaacatcagaattaagtcacttaatagatgaattaagattcaaagggttcttaaatgaaaatgacgaaatattaatgtgtgatacttcaattaaaaaattactcagtaatgaagtagaagtattcacaacaccatttaagcaaaaagcgactgaaaaagtatttataaatacggttgaaggggttgaccgagtattattcagtcagttggtagaagttcgtaaaaagttaagtgacaaattaacgatagcacctgtaagtatattttctgattacacgttggaggaatttgctaaacgtaagcctgcttcgaaacaagatatgattaatattgatggcgtaggtagttacaaattaaaacattattgtccagcatttttagaaacgattcaaaattataaagccaaagtatagtgaagacacctagtaagcattccttgttttactgggtgtttttttgaattcaaggtaaaataacactatttcttaactggagattacctattattcattattttattaaaaaagttcaaggataaatcatttaaatttgaaaattgtaataaacgtggttaaatagggaatacatacatataatctcggttttatgctatgagaaaaaaagaggtggcaaagtgattaagtttaaaaatgtaactaagcgttatggcaaacatgttgctgtcgataacattagtttcaatattaatgagggtgaattttttgtgctaattggaccttcaggttgtggaaaaactacgacattaaaaatgattaatcgactcattcacttaagtgaaggttatatttattttaaagataaaccaataagtgattatccagtatacgaaatgcgttgggatattggatacgtattgcagcagattgcattattcccacatatgacaatcaaagaaaatattgcacaagtgccacaaatgaaaaagtggaaagaaaaagatatagataaaagagtagatgaattacttgaaatggttggattagaacctgaaaaatataaaaacagaaaacctgatgaattgtcaggggggcaacgacaacgtgtaggagttatacgtgcgttagcagctgatccaccagttattttaatggatgaaccgtttagtgcattagacccaatcagccgagaaaaacttcaagatgatttaattgaattacaaactaaaattaagaagacaatcatatttgttacacatgatattcaagaggcgatgaaacttggtgataagatttgtcttttgaatgaagggcatattgaacaaattgacacaccagaaggatttaaaaataatcctcaaagtgaatttgttaaacaatttatgggtagtcatttagaagatgatgcgccatgtgttgaagagaacgcaattatccgtgacttggatattatgaaaccaatcgatgaggttacatctatgagcgcttatccaattgtttatgacaatcaaccaattgaagtattgtatcaacttttatcagagagcgagcgtgtcattgtcatgcaagaagatagcgtaggtcaatatgttattgataggaaagatatcttcaaatatttgtcccagaaaaaggaggtagctcaacatgactaactttttcgacatattgagtgaacgtaaggggcaactcttttcgacaatgatagaacatattcaaatatcatttatcgcattattgattgcaactgctattgcggtaccattaggtattttattaacgaagactaaaacgatatctgaaatcgtaatgaatattgcggcaattcttcaaaccataccatcgttggcattattaggtttaatgattcctttatttggtatcggtcgtgtgccagcaattattgcacttgtagtgtatgcgttgttaccaattttaaggaatacgtatactggaattaaagaagttgatccatcactcattgaagcggctaaaggtataggtatgaaaccatttagacgtttaactaaagtcgaacttccgatagcaatgcctgttataatggctggtgtaagaacggctatggtattaattataggtacagcaacactagcagcattaattggtgcaggcggactaggagatttaattttattaggtatagaccgtaacaatgcatcgttgatattattaggtgcaattccagcagccttattggcaattatatttgatttaattttaagatttatggctaaattatcttataaaaagttattgatgacgttaggtgttatagtgatgattattatactggctatcgctattcctatgtttgcacaaaaaggtgataaaattacgttagctggaaagcttggctccgagccatcgattattacaaatatgtataaaattttaatagaagaagagaccaaaaatactgtagaagtgaaagatggtatgggcaaaacagcatttttatttaatgctttaaaatctgacgatatagatgggtatttagaatttactggaacagttttaggtgaattaacaaaagaaccattgaagtcaaaagaagagaaaaaagtttatgaacaagctaagcaaagtcttgaaaagaaatatcaaatgactatgttaaaaccaatgaagtataacaatacgtatgctttagctgtaaaacgtgattttgctaaacaacataatatacgtacaattggtgatttaaataaggttaaagatcaacttaaaccaggatttacattggaatttaatgatcgtccagatggttacaaagctgttcaaaaggcttataatttaaatttagataacatacgtacaatggaacctaagttgagatatcaagcgatcaataaaggtaatattaatttaatagatgcatattcaactgacgctgaattaaaacaatatgatatggttgtgttaaaagatgataagcacgtatttccaccatatcaaggagcaccattatttaaagaaagctttttaaagaaacatccagaaattaagaaaccgttaaacaaactagaaaacaaaatatctgatgaagatatgcaaatgatgaactataaagtaacagttaaaaatgaagacccatatacagttgcgaaagattatttaaaagcaaaagggttaatcaaataacgaccaacgccacataagatgcgtaacaccaaattatatcttatgtggcgttgttatatttaaatctataattatgttcaatttaaacatgcaataatgattaaaaaatatgacatgttaaacacaatgtaagctattatgatgtgaaaatagtagcattgcattttagaaacatagagcgatataatgaatataagttttttgaaatttcagttaattctaaggaggttgtttttattatgaaagaacaacttaatcaactatcagcatatcagcctggtttatctccaagggcattgaaagaaaagtatggcattgaaggagatttatataaacttgcatcaaatgaaaatttgtatggaccatcgcctaaagttaaagaagcgatatcagcacacttagatgagttatattattatcctgaaacaggatcaccgacattaaaagcggcgattagtaaacatttaaatgtagatcaatcacgcattttatttggtgcgggattagatgaagttatattaatgatttctagagctgtattaacgccaggggatactattgttacaagtgaagcgacattcggtcaatattatcacaatgcgattgttgaatcagctaatgtgatacaagtacctttaaaagatggtggcttcgatttagaaggtattttaaaagaagttaatgaagatacgtcattggtatggttatgtaatccaaataatcctacaggtacatattttaatcatgagagcttagattcgtttttatctcaagtacctccacatgtaccagtaattatagatgaagcttattttgaatttgtgacagcagaggactacccggatacacttgctttgcaacaaaaatatgacaatgctttcttattacgtacattttcaaaggcgtatggattagcgggtttacgtgtaggatatgtggtagcaagtgaacatgcgattgaaaaatggaacatcattagaccaccatttaatgtgacacgtatatctgaatacgcagcagttgcagcacttgaagatcaacaatatttaaaagaggtaacacataaaaatagtgttgaacgcgaaagattttatcaattacctcaaagtgagtatttcttgccaagtcaaacgaattttatatttgtaaaaacaaagcgggtaaatgaactttatgaagcacttttaaatgtagggtgtattacgcgaccatttccaactggtgttagaattacaattggttttaaagaacaaaatgataaaatgttagaagttttatcaaactttaaatacgaatagtaagtggggagtgggacagaaatgatattttcgcaaaatttatttcgtcgtcccaccccaacttgcattgtctgtagaaattgggaatccaatttctctttgttggggccccgccggcaaggttgactagaattgaaaaaagcttgttacaagcgcattttcgttcagtcaactactgccaatataactttgtagagcattgaacattgatttatgtctcaagctcaatgcagtgtgaatgatgaggtgagagtattcagtgtaaaaagcaacaatagatgatattgttttgtatcaattgcttttttgctatactgaatcaatactgatattttgaggagaagattaaaatgacccgtaaatcaatcgcgattgatatggatgaagtattggcagatacattaggagaaatcattgatgctgtcaattttagagcggatttaggtattaaaatggaagctttgaatggtcaaaaacttaaacatgttattcctgaacatgatggattaattacagaagtattgagagaaccaggcttcttcagacatcttaaagtgatgccgtatgcacaagaagttgtgaaaaaattaactgaacattatgatgtatatattgctacagcagcaatggatgtaccaacatcatttagtgataaatatgaatggttactagagttctttccatttttagatcctcagcattttgttttttgtggtagaaaaaacatcgttaaagctgattatttaatagatgacaatcctagacagcttgaaatttttactggtacaccgattatgtttacagcagtgcataatattaatgatgatcgatttgaacgcgtaaatagctggaaagatgtagaacagtattttttagataatattgagaaataaaatatatcacttgaaaaatttcatgtagaaaagatgatggataggctataaagtaattgtgactgagatgaacttttatgtcttagacactacaacactatattggcagtagttgactgcggggccccaacatagagaaattggattcccaatttctacagacaatgcaagttggcggggccccaacatagagaaattggaacgccaatttctacagacaatgcaagttggggtgggccccaacataaagaaatactttttctttagaaattagtatttcttatgcatgagtgtaactcatgcattcatatttttaagtacacattagctgtgactaatgataaagaatcgctacataatcaatcattagtcgttctttatcatttccgtcccgctctcaataaatgttagtctatcttattattataaatcggatgaatgtgttaatctatggcagattacacgtcatccgattttttatagaatttgaaaaagacgcataaaccactatgatttaaaatacaacatcaatcattttagtggcatgcgccaaaattatatgtctgtttttgaaacagggtaatagcttaaagctaataaaaacgaatataaggtgcgttgaatcttatgattacactccaaacctaatataatatcgggttaagatcattccggatgcttacaaatcattgacagtaagtaactgaatggcatttggtataacctcaatatcaataggtgtttctaatgaaatttcgccatcaatatcaactttcattgctggatctgttgtaagtgaaatctttttaccaggtatatgctcaataccttgagtaatttcattccaattcatgctatcacgctttttaaaaatatcatttaaaatactgaaactttgttcattaaaaatgaaagtgttcagttcaccatcttgaggagacaaatcagtcaatggtatacgactaccaccaatgaatggaccatttgctgttagtatcatggtcgtttcgccagaatatgtcttatcatctattgataattgataattaaattgtgttggatttagcagtgttttgacagttgatccaatataactcaatttaccaaatatatcttttgaaccatcttgtacgttttcagcgttttgaacaatgagacctaagccaacaaagttgagtgcatattgattatttattttaattacatcgtatgtaccaacttgtgcagaaatcatttgttcactagcttgtttatgattaggtgctatatttagcgtttttgtaaaatcattaaaagtaccgcctggtaaaatgccaatagggagttgaaggtcatgtgtcataacaccgtttataagttcgttaaccgtgccatcaccgccaagaataaataatatatctacatcttttgcatagtttttagttttgatttcttggcaatatttaataatgtcaccttcgttttcactcaattgaatagaaagatgcttacaaattgaacttaatgctgttgtaacttccccaataccttgattaatattttttaatccactgtgttcatggtaaaagaggacaccatgtgtatatttattttccatagtttagcctactttctaaaaattggttcattaaatatatatacccacttttaattgttaataccaaaaatatgtttttaaatagagaaaatggtaataaatgaaattgatttctatagagtgggacgagaaaatatagttatagctgtctataatgagcatattaagtttttatttatactgatatcttgaatttaattaatagaaacctataaaaaaaggggctgacccaaaagtagctcctctatttatcttttgaaagtgaatacaaaaataaagcacactctgctataatataggtgattaatccatttgagagaggtgctttatcatgtatcaaaattataccataaaccaactttgtttgcctatagatcttgaaattaaattagaagaaaatgattttgctcatgccattgtgcagtttgttgactctattcccgatgaagtctttcttccttattatcaatctatgggtagaccccaatatcatcctcgtatgctactttccattattctttgtgcctatattcaaggggtttattcgggccgccaaatacaaaatatgctgatagatagtattcggatgcgctacttatctcaagagcaattccctaactttcgtactattaatcgttttcgcgttcatccgattatgaacgatattctagatcattcatttgttcaatttcgtgagctactggttcaaagtggcttaatcagtggcagtgctctatacattgatggtacaaaaattgaagcggatgcgaataaatactctttcgtttggaaaaaaagtattttaaagtataaggatagccttgatcaaaaagcccttgaaaactaccaacaaatggtggaaacaaaaatcttacctgagttaatagatgatttaaaggatgaactttctatagaagagattgaaaggattcgtcaatctttggaagaaaaggaaaatcaattaattgaagcgattgaccaaaccgaaacagtagaagaacgaaaattacttcgtaaagaaaaatctgaagttcataagcagaagaagcgattcgatgattttgcccaaagaaaaatgagctacgaagaacaattagtgattatgggtgtacgcaatagtttctcaaagacggatcatgacgctacttttatgcgaatgaaagaagatcacatgcttaatggccaactaaaaccaggttataatattcaacttgcgacagaaaatcaatttgctcttgcttatgattgttatccaaatccaacagatacacgaacatttatcccatttcttgaaaagattgaatcaaaaataggtttaccagaaaatattgtcgcagatgccggttatgcaagtgaagaaaattattgttatgtgttagacgaaacagaatccacccccatcattccgcatcaaggttacttaaaagagaagaaacgcgcccataaacaaaatcagtttcatcgagataattggacttacaacgagttggatgattactatatttgtcccaatcagaaaagagtagtgttctcacattattcacaacgtaaagatagaaatggatttattcgaaacttcaaaatctatgaatgtgaagattgtacaggatgtccattgagagagaaatgtaccaaagcaaaagaaggaaaaaatcgacgtttgaatattaatccaacctgggaatatataaaaataaaagcgaatgaaaagatagaaagcaaagaaacagcctcatactatgcgcagcgaaagatagatgtcgaaacagtttttggaaacattaaacaaaatatgaaatttaaaagattccatgtccgaggagctgaaaaaatttttaaggaaatgggacttgtatttcttgcgcacaattttaggaaattagtaactagagtaaggaaatatgagggaaaaacaatcatacaaaaccaaatatagggggaaaatcctctatatttcatccaaaaaaacaaaaatcgaagacatctttcacgggtgccttcgattttttggttcaaaagggactaatgggtcagccccttttttgaattaggccaacaatattaacgtatacctttcatcgctttgatgattaaaggtgagaatgctaatacaattgttgtaacaataattgcaacaacacctaggaaaataaagtaatttgtttgacctagtggttctattaacttaactaaagtaccattgattgcttgtgcagaagcgttagttaagtaccaaatactcatcatttgggcattaaatgctttaggtgctaacttaacagcagcactattacccgttggtgataagcatagctcaccgataacacaaataatgtacgataaaataacccagttaactgaaaagtttgatgaacctgatgcataacctacaataccaattagtatgtatgacgcacctgctaagaacgtaccaattgcaaattttactggcaggctaggttgtttagttccaagcttttgccataaaagtgaaataattggagctagtaataaaataaataatgggttaattgattggaagatcgcttcaccaaagtttgttttccaaccaaataagtttaatttcatatctgaatgttcaattccatatatgtttaatacattagacccttgttcttgaatagcccagaacaccattccaagaataaataatggaataaatgctttaacacgagaacgttcagtatcagtgacatctttacttctaataattaaagtgaagtaaatgattggtaatgcaatacctaatactaaaacagtattactaactaagttaaatgataatgagttagttaatgcaccaataacgataattaatacaattgctaaaacaacacttccgataataagaccatactttttcttttcagctggtgtcaatgggttagtaggtttcataccaacgctacctaagtttttgcggttgaaaagtacataccatactaaacctaatgccataccaactgctgcaatcaagaatccgccgtggaagtttttaacattaacaaagtgttgcaaaataataggtgataataatgcacccatattaactgacatatagaaaataacaaaacctgcatccatacgtctatcattttcaggatataaacggccaacgatatttgaaatgtttggcttcattaaacctgaaccaataatgatgaagaacattgatgtgaataagccgattaatgcaaatggtaagcttaaacaaatatgtccgataattataaagactgcacctaataaagtagcgcctctagtgcctgtaattctgtcagcaatccatccgcctggtattgatgtcatatagattaatgaaccataaactgacataattgacatagctgttgttttatcaattccaaggccattatctgttacggcaaagtacatgtagaaaatgagtagggcacgcatgccataataactaaacctttcccagaactctacaaagaagagtacgcctagtcctcgaggatgcccgaaaaatcctgtttgaggtatgtcttgaatttgatttccatgggagttttgttgtgtcatgtatacatcccatcctttcttcccctaatacaatagtttaagtaaatttgattgtgccttatcaactaaatattccaacaaatcacaaaaaaataaaaatattgagaatattctgttattaagcgcgcacaattaattagagataatataaaaatatacttattgacgttaaagtgcaataggtttctataaaaatgttgtttaattcgtgtactaatattcttttggtgtactttggtgtaaaatgttattttaatgtaacctattatgtatgctaaatgaaaaacacaccaataagttaggaaaatcaacttattggtgtgtttattaaatgatacatttaacgattatctattttttcgggatataaatcatgattcatcaaacgatgctcagccattttttcatatttagaatttggacgtccatagtttgtataaggatcaatagaaattccaccacgtggtgtgaacttgccccagacttcaatataatgtgggtccataagctctatcaaatcattcataataatattcatacaatcttcgtgaaaatcaccgtgatttctgaaactaaataagtataatttcaaagattttgattcaaccattttaacatttggaatatatgaaatatagatagttgcaaaatctggttgcccagtaattggacataatgatgtaaattctggacagttgaattttacgaaatagtcacgaccttgatgcttattatcaaacgattctaatacatcaggacgatagtcaaaattgtaagtattgtcttgatttcctaataaagttatatcttgtaattcatcttgttgacggccatgtgccatataaagcgctcctttaaatttatttttttattattttggcgtctcggcgtgctttttcaaacatgtaataacttgcaccgataataacgacgtaacctaatgttgcatagaaatctggagattctccgaatagaataaatccaagtattgctgtgaaaattatagatgcatacgtaaaaatagaaatatcttttgctgctgcaaaactatatgctaaagtaacaccaatttgacccacagcggcagctaagccagcccctaatagataaagtatttgcatctgactcattggttcataagtatatgcagtgaaaggtattaaaacgatgacagaaaataaggagaagtaaaatactatagtatatggtgcttctcttgtactaagtgctcgaacacatgtatatgctgatgctgcaaaaatacctgagaataagccagctaatgatggaatcatagatgatgaaaattcaggtttcactattaaaagcatacctaaaatagcaattatcattgctgtaatttgatacttccttaccttttcatgtaagaaaacaatgcttaataaaatcgtccagaaaggattgagtttcattaatgaatcggcatcactaagtaccatatgatcaatggcataaatatttaacaatacaccaataagtccaagtgttgatcgtgttattaataagggttgacttgaaagtctgccaaacattggctgatggtatttatatataaaaaataatggaataaacattgctactaagtttcgtgctaatgatttttgaaaaacaggaaggtcacctgcaagtctgaaaaacactgacataaaactgaaaccaatagccgaaattaaaatggcaatgataccttttactttaggattcaattttatcgcctcttttatataaaattaacgtatttatattagcataaaacaacatgttgtgcataaatagttgtaatttactataaaaagactataatagactgtagcgaacaaacgttctgtgtttatttgtcggaataatagggcattacacttttatgaatgtttgtgttattacataaaacaaatatcaattcagtatcaagctaataagctttttcttgatttctgttgatacaattgagattgacacagatttaaaaaaatcaagtgatatctactaaaaaatttttttaaatttgttcaagtttttctaatttagtattggtgcctagttggaacgttttacgaacattcgattagaaaatggcactttaaatcatagtgtgtcttatgtataatgaaacacataatatagtgttggtgaaacgaaaaagacacaatatcttgtgttttgtatgcaaatgctttatttatgaagaaattacatttaaaagtaatttaacacagaaatttaatagttattatcaattaatagtcatatttttagaaaatgtactgagcaaatggaagatatccaatgatgtaaacactacatatagtgatttttatacattcaacccatataagctactattttctcaaatataaatctatgcaattggtttacatttgagaaaataagtagcttcattatagttaatacaatgctgagataaccatagtaaccatgttgttaaagcattttttaattggaatgactactttatttaaaagggttgaagaaagaaggtgatccaatgaaaataatatatttttcatttactggaaatgtccgtcgttttattaagagaacagaacttgaaaatacgcttgagattacagcagaaaattgtatggaaccagttcatgaaccgtttattatcgttactggcactattggatttggagaagtaccagaacccgttcaatcttttttagaagttaatcatcaatacatcagaggtgtggcagctagcggtaatcgaaattggggactaaatttcgcaaaagcgggtcgcacgatatcagaagagtataatgtccctttattaatgaagtttgagttacatggaaaaaacaaagacgttattgaatttaagaacaaggtgggtaattttaatgaaaaccatggaagagaaaaagtacaatcatattgaattaaataatgaggtcactaaacgaagagaagatggattctttagtttagaaaaagaccaagaagctttagtagcttatttagaagaagtaaaagacaaaacaatcttcttcgacactgaaatcgagcgtttacgttatttagtagacaacgatttttatttcaatgtgtttgatatttatagtgaagcggatctaattgaaatcactgattatgcaaaatcaatcccgtttaattttgcaagttatatgtcagctagtaaatttttcaaagattacgctttgaaaacaaatgataaaagtcaatacttagaagactataatcaacacgttgccattgttgctttatacctagcaaatggtaataaagcacaagctaaacaatttatttctgctatggttgaacaaagatatcaaccagcgacaccaacatttttaaacgcaggccgtgcgcgtcgtggtgagctagtgtcatgtttcttattagaagtggatgacagcttaaattcaattaactttattgattcaactgcaaaacaattaagtaaaattgggggcggcgttgcaattaacttatctaaattgcgtgcacgtggtgaagcaattaaaggaattaaaggcgtagcgaaaggcgttttacctattgctaagtcacttgaaggtggctttagctatgcagatcaacttggtcaacgccctggtgctggtgctgtgtacttaaatatcttccattatgatgtagaagaatttttagatactaaaaaagtaaatgcggatgaagatttacgtttatctacaatatcaactggtttaattgttccatctaaattcttcgatttagctaaagaaggtaaggacttttatatgtttgcacctcatacagttaaagaagaatatggtgtgacattagacgatatcgatttagaaaaatattatgatgacatggttgcaaacccaaatgttgagaaaaagaaaaagaatgcgcgtgaaatgttgaatttaattgcgcaaacacaattacaatcaggttatccatatttaatgtttaaagataatgctaacagagtgcatccgaattcaaacattggacaaattaaaatgagtaacttatgtacggaaattttccaactacaagaaacttcaattattaatgactatggtattgaagacgaaattaaacgtgatatttcttgtaacttgggctcattaaatattgttaatgtaatggaaagcggaaaattcagagattcagttcactctggtatggacgcattaactgttgtgagtgatgtagcaaatattcaaaatgcaccaggagttagaaaagctaacagtgaattacattcagttggtcttggtgtgatgaatttacacggttacctagcaaaaaataaaattggttatgagtcagaagaagcaaaagattttgcaaatatcttctttatgatgatgaatttctactcaatcgaacgttcaatggaaatcgctaaagagcgtggtatcaaatatcaagactttgaaaagtctgattatgctaatggcaaatatttcgagttctatacaactcaagaatttgaacctcaattcgaaaaagtacgtgaattattcgatggtatggctattcctacttctgaggattggaagaaactacaacaagatgttgaacaatatggtttatatcatgcatatagattagcaattgctccaacacaaagtatttcttatgttcaaaatgcaacaagttctgtaatgccaatcgttgaccaaattgaacgtcgtacttatggtaatgcggaaacattttaccctatgccattcttatcaccacaaacaatgtggtactacaaatcagcattcaatactgatcagatgaaattaatcgatttaattgcgacaattcaaacgcatattgaccaaggtatctcaacgatcctttatgttaattctgaaatttctacacgtgagttagcaagattatatgtatatgcgcactataaaggattaaaatcactttactatactagaaataaattattaagtgtagaagaatgtacaagttgttctatctaacaattaaatgttgaaaatgacaaacagctaatcatctggtctgaattagcagatgattagactgctatgtctgtatttgtcaattattgagtaacattacaggaggaaattatattcatgatagctgttaattggaacacacaagaagatatgacgaatatgttttggagacaaaatatatctcaaatgtgggttgaaacagaatttaaagtatcaaaagacattgcaagttggaagactttatctgaagctgaacaagacacatttaaaaaagcattagctggtttaacaggcttagatacacatcaagcagatgatggcatgcctttagttatgctacatacgactgacttaaggaaaaaagcagtttattcatttatggcgatgatggagcaaatacacgcgaaaagctattcacatattttcacaacactattaccatctagtgaaacaaactacctattagatgaatgggttttagaggaaccccatttaaaatataaatctgataaaattgttgctaattatcacaaactttggggtaaagaagcttcgatatacgaccaatatatggccagagttacgagtgtatttttagaaacattcttattcttctcaggtttctattatccactatatcttgctggtcaagggaaaatgacgacatcaggtgaaatcattcgtaaaattcttttagatgaatctattcatggtgtatttaccggtttagatgcacagcatttacgaaatgaactatctgaaagtgagaaacaaaaagcagatcaagaaatgtataaattgctaaatgacttgtatttaaatgaagagtcatacacaaaaatgttatacgatgatcttggaatcactgaagatgtgctaaactatgttaaatataatggaaacaaagcactttcaaacttaggctttgaaccttattttgaggaacgtgaatttaacccaatcattgagaatgccttagatacaacaactaaaaaccatgacttcttctcagtaaaaggtgatggttatgtattagcattaaacgtagaagcattacaagatgatgactttgtatttgacaacaaataacaattaaattaaaagaccttcacatgtaaagggaaatagcgattcgtttcgtcttgtctcctacatgttgaaggtctttttttatgtgtatctaactcattatgagtctgagtaagaaatcaatgctctaagatgtacaatgctatttatattggcagtagttggcggggccccaacacagaagcaggcggaaagtcagctaacaatattgtgcaagttggcggggccccaacatagaagcaggcggaaagtcagctaacaatattgtgcaagttggcggggccccaacataaaagcaggcggaaagtcagctaacaatattgtgcaagttcgggcggggccccaacataaagaaaaactttttcctttagaaattatcacttccacataagttttactcatgtattcctatttttaagtacacattagctgaggctaatgttaagaaccactacttaatcaatcattagtagtttttatcatttccactattcccagacatcaaaatcttaagtgttctattttactttaagtaaacaaaatacacattccgaaaaattaaatttcagtttaattgcaaatatcaataaaattgacactaaattatttgaaaggctattgaaattatggtcaaaaaacgctactattaatgagaaatattatcaatgataatgattatcattaatttaaagggagaaaaatttgtaatgaagtatttattaaagggaaatattttgcttctattactaatattgttgacaattatttcgttgttcataggtgtgagtgaactatcaattaaagatttactacatttaactgagtcacagcggaatattttattctcaagccgaataccaaggacgatgagtattttaattgctggaagttcgttggctttagcaggcttgataatgcaacaaatgatgcaaaataagtttgttagtccgactacagctggaacgatggaatgggctaaactaggtattttaattgctttattgttctttccaaccggtcatattttattaaaactagtatttgctgttatttgcagtatttgcggtacgtttttatttgttaaaatcattgattttataaaagtgaaagatgtcatttttgtaccgcttttaggaattatgatgggtgggattgttgcaagtttcacaaccttcatctcattgcgcacgaatgctgttcaaagcattggtaactggcttaacgggaactttgccattatcacaagtggacgctatgaaattttatatttaagtattcctcttttagcattgacatatctttttgctaatcatttcacgattgtaggaatgggtaaagactttactaataatttaggtttgagttacgaaaaattaattaacatcgcattgtttattactgcaactattacagcattggtagtggtgactgttggaacattaccgttcttaggactagtaataccaaatattatttcaatttatcgaggtgatcatttgaaaaatgctatccctcatacgatgatgttaggtgccatctttgtattattttctgatatagttggcagaattgttgtttatccatatgaaataaatattggtttaacaataggtgtatttggaacaatcattttccttatcttgcttatgaaaggtaggaaaaattatgcgcaacaataataaaaaaataatgcttttaattgcagtaacgttattaattagtatgctgtacttatttgtaggtattgattttgaaatatttgaatatcaattttcaagtcgtttaagaaagttcatattaattattttagtaggtgctgccattgcaacttcagtggtgatttttcaagcgattacaaataaccgtctattgacaccatcaataatggggttagatgcagtttatttatttatcaaagtattgccagtctttttatttggaattcaatcggtatgggttactaatgtatatttgaactttatattaacacttataacgatggtgttattcgcactaatcctattccaaggtatctttaaaatcggacatttttcaatttattttatcttacttattggtgtccttttaggaacattttttagaagcataacaggttttattcaactgattatggatcctgagtcatttttagcaatacaaagtagtatgtttgctaattttaatgcttctaattcgaatttagttactttctcagcagtgctattagtaatcttattagtcattacaattttactattgccttatttagatgtattgcttttaggtcgtgctgaagcaattaatcttgggatatcgtatgaaaaattaacgcgaattctacttgtaatagtctcagttttagtttctgtgtcaactgcattagtaggaccaattacatttttaggtttattaactgtaaatctagcgcatgaactaatgaagacgtatgaacataagtatattttaattgcgacaatttgcttgagttggattagtttatttagtgcgcaatgggtagttgaaaatgtgtttgaagctacgacagaaatgagtatacttattgatttgattggtggaagttatttcatttatctattagttagaaggagaaatgcgcaatgattcaagttgaaaatttaactaaaactataaataatcaaatgatattggaagatattagcatagatatcgaaaaaggtaaattgacttctttaattggacctaatggtgcgggtaagagtactttactttcagcgatatgtaggttaattcgttttgagaacggtgaagtgaaaatagatggacagctcatgtctgattataaaaataatgacttgtcgaaaaaaatatctatattaaaacaaacaaaccatactgaaatgaatattacggtagagcagttggtaaactttggacgattcccttattctaaaggtcgtttgacgaaagaggatcatgatattgtcaatgatgcgctagatttgttgcaactacaagatatcagaaatcgtaatattaagtcattatctggtggacaacgtcagcgtgcatacattgcaatgacaatagcacaagatactgaatatattttgctagatgaaccattaaataatttagatatgaagcatgctgttcaaattatgcaaacgttaaaaatgttagcgcataaaatgaataaagcgattgtcattgtgttacatgatattaactttgcgtcctgttattcagatcagattgtagcattgaaaaacggacaactagttaagtcagatttgaaagataatgtcattcaaagtagtgttttaagtgatttatatgacatgaatattcaaattgaacatataagaaatcaaaggatttgtttatattttaaggattgataatttggagacactttaaaggggtgatgcgccaattaaagaagggttaaacgtaaagcatttatttatatttcacatcaagcacacagattaagccaaaagaggagaatattatattatgaagaaaacagtcttatatttagtattagcagtaatgtttttattagcggcatgcggtaacaattctgataaagaacaatcaaaatcagaaactaaaggttctaaagatacagtaaaaattgaaaataactataaaatgcgtggcgagaaaaaagatggtagtgacgctaaaaaagttaaagaaactgttgaagtaccaaaaaatcctaaaaatgcagttgtgttagactatggcgcattagatgtaatgaaagaaatgggcttatcagataaagtaaaagcattacctaaaggggaaggcggtaagtcattaccgaatttcttagaatcatttaaagatgataaatatacaaacgttggtaatttaaaagaagtgaattttgataaaattgctgcgacgaaacccgaagtaatctttatctctggacgtacagctaatcaaaagaatttagatgaattcaaaaaagctgcacctaaagcgaaaattgtttatgttggtgcagatgaaaagaacttaattggttcaatgaaacaaaacactgaaaatatcggaaaaatttacgataaagaagataaagctaaagaattaaataaagatttagataacaaaattgcttcaatgaaagataaaacgaaaaacttcaataaaactgttatgtatttactagttaacgaaggtgaattatcaacatttggacctaaaggtcgttttggtggattagtttacgatacattaggattcaatgcagttgataaaaaagtaagtaatagcaatcatggacaaaatgtttctaacgaatatgttaataaagaaaatccagatgttattttagcgatggatagaggtcaagcgataagtggtaaatcaactgcgaaacaagcattaaataatcctgtattaaaaaatgttaaagcaattaaagaagacaaagtatataatttagatcctaaattatggtactttgcagctggatcaactacaactacaattaaacaaattgaggaacttgataaagttgtaaaataattttaaaagaggggaacaatggttaaaggtcttaatcattgctcccctcttttctttaaaaaaggaaatctgggacgtcaatcaatgtcctagactctaaaatgttctgttgtcagtcgttggttgaatgaacatgtacttgtaacaagttcatttcaatactagtgggctccaaacatagagaaatttgattttcaatttctactgacaatgcaagttggcggggcccaaacatagagaatttcaaaaaggaattctacagaagtggtgctttatcatgtctgacccactccctataatgttttgactatgttgtttaaatttcaaaataaatatgatagtgatatttacagcgattgttaaaccgagattggcaatttggacaacgctctaccatcatatattcattgattgttaattcgtgtttgcatacaccgcataagattgctttttcgttaaatgaaggctcagaccaacgcttaatggcgtgcttttcaaactcattatggcacttatagcatggatagtatttattacaacatttaaatttaatagcaataatatcttcttcggtaaaataatggcgacagcgtgtttcagtatcgattaatgaaccataaactttaggcatagacaaagctccttaacttacgattcctttggatgttcaccaataatgcgaacttcacgatttaattcaatgccaaatttttctttgacggtcttttgtacataatgaataaggttttcataatctgtagcagttccattgtctacatttaccataaaaccagcgtgtttggttgaaacttcaacgccgccaatacggtgaccttgcaaattagaatcttgtatcaatttacctgcaaaatgaccaggcggtctttggaatacactaccacatgaaggatactctaaaggttgtttagattctctacgttctgttaaatcatccattttagcttgtatttcagtcattttaccaggagctaaagtaaatgcagcttctaatacaactaagtgttctttttgaataatgctattacgataatctaactctaattcttttgttgtaagtttaattaacgagccttgttcgtttacgcaaagcgcatagtctatacaatctttaacttcgccaccataagcgccagcattcatatacactgcaccaccaattgaacctggaataccacatgcaaattcaaggccagtaagtgcgtaatcacgagcaacacgtgagacatcaataattgcagcgccgctaccggctattatcgcatcatcagatacttcgatatgatctagtgataataaactaattacaataccgcgaataccaccttcacggataataatatttgagccatttcctaaatatgtaacaggaatctcattttgataggcatatttaacaactgcttgtacttcttcatttttagtaggggtaatgtaaaagtcggcattaccacctgttttagtataagtgtatcgttttaaaggttcatcaactttaattttttcatttgggataagttgttgtaaagcttgatagatgtctttatttatcacttctcagtacatcctttctcatgtctttaatatcatatagtattataccaattttaaaattcatttgcgaaaattgaaaagaaagtattagaattagtataattataaaatacggcattattgtcgttataagtattttttacatagtttttcaaagtattgttgcttttgcatctcatattgtctaattgttaagctatgttgcaatatttggtgtttttttgtattgaattgcaaagcaatatcatcattagttgataagaggtaatcaagtgcaagataagattcaaatgtttgggtattcatttgaatgatatgtagacgcacctgttgttttagttcatgaaaattgttaaacttcgccatcataactttcttagtatatttatgatgcaaacgataaaaccctacataatttaagcgtttttcatctaaggatgtaatatcatgcaaattttctacacctactaaaatatctaaaattggctctgttgaatatttaaaatgatgcgtaccgccaatatgttttgtatattttactgggctgtctaagaggttgaataataatgattcaatttcagtgtattgtgattgaaaacaattagttaaatcactattaatgaatggttgaacatttgaatacatgataaactcctttgatattgaaaattaatttaatcacgataaagtctggaatactataacataattcattttcataataaacatgtttttgtataatgaatctgttaaggagtgcaatcatgaaaaaaattgttattatcgctgttttagcgattttatttgtagtaataagtgcttgtggtaataaagaaaaagaggcacaacatcaatttactaagcaatttaaagatgttgagcaaaaacaaaaagaattacaacatgtcatggataatatacatttgaaagaaattgatcatctaagtaaaactgatacaactgataaaaatagtaaagaatttaaggcactacaagaagatgttaaaaaccatctcatacctaaatttgaagcatattataagtcagcaaaaaatttgcctgatgatacaatgaaagttaagaaattaaaaaaagaatatatgacgcttgcaaatgagaagaaggatgcgatatatcaattaaaaaaattcataggtttatgtaatcaatctatcaagtataacgaagacattttagattatacgaaacaatttgaaaaaaatagatacaaagttgaatcagaaattaaattagctgataataaaagtgaagcaactaatcttacgacaaaattagaacataataataaagcgttaagagatactgcgaagaagaacctagatgatagtaaagaaaatgaagtaaaaggcgcgattaaaaatcacattatgccaatgattgaaaagcaaattaccgatattaaccaaactaatattagtgataagcatgttaataatgcaaggaaaaacgcaatagaaatgtattacagtctgcagaactattataatacacgtattgaaacaataaaggttagtgagaagttatcaaaagtcgatgtagataagttgccgaaaaagggtatagatataactcacggcgataaagcctttgaaaaaaagcttgaaaaattagaagaaaaataactataatcatttttcaaagttaaaaattttgaatttatggttaacatgtcaacttactatgtgtataatggtaaacattgatattaactatatgtataaaaatgtcacgcagatgctatttaaatgtgataaatatttttagaggtgaatagagtggctataaagctaagttcaattgaccaatttgaacaggttattgaggaaaataaatatgtttttgtattaaaacatagtgaaacttgtccaatatcggcaaatgcgtacgatcaatttaataaatttttatatgaacgcgatatggacggttattatttgattgtccaacaagaacgcgatttgtcagattatattgctaaaaaaacgaacgttaaacatgaatcacctcaagcattttattttgtaaatggtgaaatggtttggaatcgagaccacggtgatatcaatgtgtcgtcattagcacaagcagaagaataatgaaactatagggttggaacattttgccttacactactagacgtgaatagcacaacttaaattcgtgtgaatcagagtagtttggctataatgatgttctgaccttttattttatgtcacctttagaagcagttaagttagtacttttttacaaacatatgtataatatattcgagtatttttattgaaaatattttggaaaacgacgaatccaataagaaaatttaaacatgatttgtaagttagtttaataggaaatatatgctaaaccaaaagaagcatattgttatttactggaataattaataatcatgtcatgttaaatgttcgcatataatcacgagataaaatctaaaatttaagattaatcttttatgaataaaaaacgtatcacaacaaataataaagtaaggtggtcaaggttatgaaagtattagtagccatggatgagtttcatggaattatttcaagttatcaagctaatagatatgttgaagaggcagttgcaagccaaattgaaactgcagatgtagttcaagtaccattgtttaatggaagacatgaattattagattctgtatttttatggcaatctgggcaaaagtatcgtataccagtacatgatgcagatatgaatgaagttgaaggtgtttacggacaaactgatacagggatgaccgttatcgaggggaatttatttttaaaaggtaaaaaaccaattgttgaacgaacaagttatggtttaggagaaatgattaaacatgcattagataacgacgcaaaacatgttgtaatttcactaggtgggattgatagttttgatgctggtgcaggtatgttacaagcattaggtgctcaattctatgatgacgaagggcgtgtcgtagatatgagacaaggtgctggtgtaattaaatatattcgtcgtatggatatgtcgaacttacaccctaaaatggaaacagcaagaattcaagtaatgtcggatttttcaagtcgattatatggtaagcaaagtgaaatcatgcaaacttatgatgcgcatcagttgaatcataatcaagcagcagaaatcgataatttaatttggtattttagtgagttatttaaaagtgaattgaaaattgcaattggtccagttgaacgtggtggtgctggtggtggaattgcagcagtcttgaatggactgtatcaagctgaaatattaaccagtcatgcattagtagaccaactaacacatttagaaaatttagttgaacaagcggatttaattatttttggagaaggattaaatgaaaatgatcagttgctagaaacgacaacattgcgtattgcagaactttgtcataaacatcaaaaggttgccattgcaatttgtgcaactgctgaaaagtttgatttatttgaatcacaaggggttacagcaatgtttaatacatttatcgatatgccagaaacttatactgactttaaaatggggttacaaattaggcattatacggttcagtctttaaaactgttgaaaacacattttaatgttgaggtttagtaaagaaggactaaattggtgatgctgtcatgatggttaataacatttatgatggttagcaaaacgaattagaagatcgaaagtatacgtaaaaaatatgaaaaatcacgctatcattgcactgaatgttagcgtgatttttatatattaattaagcctgagttgaactagtatataatcgttggtttttagtgattttcagcgatatcttctacaattccaatgattacttgtactgctttttccataacatcaatggatgcatattcatatgggccgtggaagttaccgcaacctgtaaagatgtttggagttggtaaccccataaatgacaattgtgaaccatctgtaccaccgcgaataggttcagtgtttgctggaatatctaatttggcaaagacacgtttaggtatatcaataatatgaggcaatggtaatattttttctgccatattgaaatattgatccgatatatcaactttaactggataattttcaaaatgggcattgatatcgtcacgtatttctaaaatacgtttcttacgcaattcgaattgttttttatcatgatcacgaataatgtattgcaaagttgctttttcaacagttccttcaaagttcattaagtgataaaagccttcgtatccttctgttcgctccggaacttcactatcaggtagcaaactatcgaattgttcacctaaacgtattgcgtttaccattgcatttttagctgaaccaggatgaacatttacaccgtggcatgtaataaccgcttcagcagcgttaaagctttcatattgtaattctccatattgactaccatccatagtataagcaaaatcagcattgaagcggtcaacatcaaatttatgtggaccacgaccgatttcttcgtctggtgtaaatccaatgcgaatggtaccatgtttaatttctggatgttcttgtaaataacaaatagcttccataatttccacaatacccgctttatcgtctgcacctagtaacgatgtaccatcagttaccattaatgtatgaccaactaaactgttaagttctggaaatactttaggatctaagacacgtttagtattgcctagtttgtatggcttaccatcatagttttcaataatttgcggtttaacatttgaagcattgaaatcaggtgatgtatcaacatgcgccaaaaatccaactgttgggacgtcgacatcgatgttactttctaatgtagcaaataagtagccattttcatctaaatcagttggcaatcctaattgttgtaattctttttctaataaatgtaacaaatcccattgcttttcagttgaaggtgttgttgtagattttggatcagattgcgtatcaattgtcgtatatcttgttaatctatctatcaattggttcttcattatattcgaccccttaaactctattattcatgttgtaagattttttatatgtcttacctttgattttaccatacagttgtttgatacgtgtgtataggtaatatagaatttcagaaactaatataccgaaagcaatcgcacctgaaatcagtgtaacttctaaaaatgtatttacagcacttgtataatcatttgatactaaaaaacgagtcgcttgataagctgcaccaccaggtactaatggtataatgcctggcactatgaatataattaccggtcgtttatatctgcgactcatagtatgactcattaagcctaaaattaagcttcccaaaaatgaagcgccaacttttccaaactctaaatctaccgttaattggtaaatcgtccatgcaatggcacccacaaatccacatgctactaagaggcgtttgggtgcattgaaaatgatagagaaaagtactgttgatataaagctgattgtaaaatgaaataaataaaatagcatgctttaacagtccttccttaaatgattaataaaacgattgcgacaccagcaccgattgcgaatgctgttaatgcagcttcaacaccgcgagacatacctgcaagtaattcacccgctaataaatctcgaatggcattggtaattaatataccagggacaagtggcatgacactggctatagtaatgatatcttgattggttgcaatgcctaatttagtaaatgtggctgcaatggatatgaccacagcggctgcaacaaactctgagaaaaatttaatttgtatatagcgttgcacaaagctgaatgttaaaaatgcggatccgccagcaatgactgcaatccaacaatctgatgcgacaccaccaaacataaataggaagaagccacatgcaatggcagctgcaaagaaattcgttaaaaaagaatattgtaatgatgcatgctgtaaatgaataaattcagatttagcttcatcaattgtgagttctttatttgatattttacgtgaaagactattcgttaaagcgattttctctaaatctgttgtacgctcttgtacacgaattaatcttgtacttgttcgatcgtttaatgaaaaaataattgcagttgaactgacaaaactatatgtattatgaagaccataactatgtgcgatacggttcattgtatcttcaactcgatatgtttcagcacctgattcaagtaaaattctacctgcaattaatacaacatcaatcactttgttttcatctataattgtgattgaatctggcatatcaattcacctccaatgatatgtgttatttatttgaacaattgaagtttacaacttgttgttacaactttcaatagtgagactttgtgttagtatgatgaacttgtatggttcaaatttaaataagaaaaactgttaatctttgctattatactatgatttaataatagcaaaggattaacagttttgtcgttgttataaattgataatagggttaaacattactttgtttcgcccttgatttttggctacatgcaccatatcgtctgcatctttaaacactttacgctgtgattttggatcgtcatctgttaaataaccaacaccgatagacactgacaatttaataacttctttgtttggtaaatggaatgatgatttttcaacacccgaacgaatattttcagctaatttaacactttgatcaagtgaataattgtgaatgacaactgagaactcttcgccaccatttctaaaaattttaaattgattcggcacatagtttttaagtaattgagacatttgttttaatacagcatcacctgatttgtgtgagtaggtatcattgacatctttaaatccatcgatatcgattaataataatgcgatactttgatgttctttttcagcttttcgtgaaatttcatttaaatgtctatcaaattcttttacattacctaagcctgttaagtaatcatatttatcttcgttttcataacgatttacgagtgagaagaaatgccaaatatcgacaaatgttatcgctgaagctaaagtgataattaatgaaattggtattaaaatgataacttccgatagtgtgtaaataggactcactaacgcgacaccaaataaaatgattattgtaacaacattaagtattaataatgatagcacatcattttgttttaaaaatggtccaatagcacttgttactgcagcaataacaatcaacgtaacaccgtacataatcgagttgttaaatactacaatttcaacaattgctacaattactgtggcagataatgtatagaccatatttgtaaatctacctaaaaacaataaaggaacgaatgttaagtgaattaaataatcttcacgataagggatagggtagacagataataataatgatacgattgtcattaaaacagtgacataagccttagaaaaaaccatacgtttgttttctgaatactgtaagcgatggaataaatagattccagcgactataacagatatattgtatataaatgcttcgaacatgtctgaatcgactcctttaattgaccactagctattgtaagtgaaaacttacaatttgtcattagtttacatataaaattaatgtatgatatagactttgatgttaaaatgttgccttaaatgatatgatgaaaaaatgaataataggcgatatataagaaatgaatcgtatagttgtaaatatgatatcattgattgaacgaattaatttataataaagctataagatatacgtagaaaatagatatatcattctataaagacaatattaaataaatataacgttaaaaacaattaatatcgatgaaggtgaataaatggttacattattactagttgcagtaacaatgattgtcagtttgacgataacaccaattgttattgcaatatcgaaaagattaaatttagttgataaaccaaattttagaaaagtacacactaaacctatttcagttatgggtggtacagtgattctcttttcatttttaataggtatttggattggtcatcctattgaaacagaaatcaaaccacttattattggtgcgattattatgtacgtacttgggcttgtagatgatatctacgatttgaaaccgtatataaaattggctggtcaaattgccgctgccttagtagttgctttttatggtgtgactattgattttatttcgttgccaatgggtacaacgattcattttggatttcttagtattccaattactgtgatttggattgttgctattacaaatgcaattaacttaattgatggactcgatggtttggcgtcgggtgtttctgcaatcggactcattacaatagggttcattgcaattttacaagctaatattttcataacgatgatttgttgtgttttattaggctctttaattgggtttttattttacaatttccatcctgccaaaatatttttaggtgatagtggggctttaatgattggatttatcatcggattcctttctttactcggattcaaaaatattacaattattgcattgttcttcccaattgttatcttagcagttccattcattgatactttgttcgcaatgattcgacgtgtgaaaaaagggcagcatataatgcaagctgataaatcgcatttgcatcataaactattagctttaggctacacacatagacaaacagtattattaatctattcaatctctattttatttagtctttcgagcattattttgtatgtatcgccaccattaggtgttgtattaatgtttgtattaatcatatttagtattgaattaattgttgaatttacaggattaatagataacaactaccgaccaatattaaatttaattagtcgtaagtcatctcataaagaggaatagggaatgaaagcatagctgtatgggataatttgtattatatggctttactctttacaatttttttgtattaaatttcaaatataaaaagcactgccataaacgtgtacttcaattgtcgtttaataatacgcaattgatatttaccgtcttatgatagtgctttttatttttattcagttggtatatcgaaaggtaactgctttggagtttcttcagtcaaatcgaaatttcctgcagtcatttgatttaaaaagttaataaacgcttcatagtcacttttaacgacatcgatatagtagcttaccttatcagtgtaagtttggtttcttaacataaaatgagttgaagctaattcatattcaaatttaccagtttgatcataattcagtgttactatacatggtactgcttctcgtagttcgacacgcccgatatcataaatgacgtctctaacagcaccgctataggcgcgaattaaaccgccaccacctaatttaataccaccaaaatatcttgttactacgacacacgcattatgaacatcgagcttttttaatatgtctaacattgggacaccggcagttcctgtcggttcaccatcatcattcgctttttgaatattcatttcaggtccaatagtatatgcagaacaattatgagtggcatctttatgttctttttttattgcagcaataaatgctttagcttcatcttcattttgaacaggtttgatatgagcaatgaatcttgatttactaatcacattttcaataatgtgttcttttttaacagtaatgatattttgtgtcataataactccttaattcataagcttaagattatttaatcttcattatacactgaaaatgacatgactataaatcgtttgattgccattttctttttaactgaaatattgtatcattgctatgagtatattttaggaggacgactatgaaaattgctgtgatgaccgattctacaagttatctgtcgcaggacttaatcgataaatataatattcaaatagcgccattaagtgtgacttttgatgatgggaagaactttacagaaagtaatgaaatagcaattgaagaattttataataaaatggcatcgtctcaaacgattccaacaacaagccaaccagcaattggcgaatggattactaaatatgaaatgttaagagatcaaggttacacagatatcattgtcatttgcttatcaagtgggattagtggaagttatcaatctagttatcaagcaggggaaatggttgaaggtgttaatgtacatgcatttgatagtaagcttgcagcaatgattgaaggatgttatgtattacgtgctattgaaatggttgaagaaggatacgagccacagcaaattattgatgatttaactaatatgcgtgaacacacaggtgcatatttaattgttgatgacttaaagaatttacaaaaaagtggtcgaattactggtgctcaagcatgggttggaacattattgaaaatgaagccagttcttaagtttgaagatggcaagattataccagaagaaaaagttcgtactaaaaagcgtgccattcaaacattagaaaagaaagtattagatattgtaaaagactttgaagaagtaactttatttgtcataaatggagatcatttcgaagatggtcaagcgttatacaaaaagttacaagatgattgtccttcagcttatcaagtagcatactctgagtttggtccagttgttgcagcacatttaggttctggtggattaggtttaggctatgttggcagaaaaataagattaacataattataaaattttaataaaagagtctatattgtaattggaaattatctctcgtatacatggctttaaatgttcatcatttgaaagccaaaatgctaaagatataagaaaatcattataatattaggctcttttttacgttgaaatgaggttttaagcattaaacattacgggaaattaattcatcctcatacttcacttactaatgaaaaaattaaaaaagaagtaacaggtgtcatcaaacaaaattcaaactattattgtgttcaatgtgaaagtacaaatccaaagcatttttatcagtatgattcctcagtacattccaagaaaattgtatattgcagaaattgtatatcactgggtcgaatggataatgtaacaagatataaaataacagagagttcgcaaagttcatcacaagcatattatcatctctcatttgaattgtcggaacagcagtcttatgcctcagaacatattgttcgagccattagaaagagacaaacgattttgttatatgccgtaacaggtgcaggtaagacagaaatgatgtttcaaggcattcaatatgcaagaatacagggagataatatagctattgtgtcaccacgtgtagatgttgttgtagaaattagtaaacgtattaaagacgcatttcttaatgaagatatagacatactacaccagcaatcaagacaacaatttgaagggcattttgttgtatgcacagtgcatcaactttaccgattcaaacagcactttgatactatttttattgatgaagtcgatgcctttcctttatcaatggataaaaatttacaacaagcattgaagtcatcttctaaagttgaacatgcaacaatttatatgacagcaacaccaccgaaacaacttctgtcagagattccccacgaaaatataattaaattgccagctcgctttcataaaaaatcacttccagttcctaaatatcgttatttcaaacttaataataagaagattcagaaaatgttataccgaattttacaagatcaaattaataatcaacgttatacactggtgttttttaacaatatagaaacaatgattaaaacattttcggtttataagcagaaaattactaaattaacatacgtccatagcgaggatgtttttcgctttgaaaaagttgaacaattaaggaatggacatttcgatgtcatttttactacgacaatattagaacgtggatttacaatggcaaatttggatgttgttgttatcgatgcacatcaatatactcaagaggctttaatacaaattgctggacgtgttggacgaaaattagaatgtcctactggaaaagtattgttttttcatgaaggggtaagtatgaatatgattcaagctaaaaaagagattcaaaggatgaacaaattagcattaaaaagaggttggattgatgaataattgtttgagttgtggtgctaagttatatgaaaatataaccatttataatttgttcaagaaacctaatagattatgtgacagatgcaaagagaattgggacaatattaaacttgatattaaagcaaggcgatgttcaaggtgcttaaaacacttaaatcaagatgaagcgtattgtttagactgcaagtttctatcggcacactttaatttaatggaacaattatattgtcaatttcaatatgacggtttaatgaaagagatgatacatcagtataaatttttgaaagactattatttatgtgaattattggcacatttgattgaaataccacaaacatcttatgactatattgtgccaattccttcttcgccggcacatgatttatctagaacatttaacccggtagaagcagtactaaaagctaaagggattcgctttgataagattttaaagatgtcaaatagaccaaaacagtctcatttaactaagaaagagcgtctggcagatgaaaatccatttattattgatacggaattagatttaaatggtaaggaaatattactcgttgacgatatttatacaactggattaacaattcatcgtgcagggtgtaaattatatgctaaaaatatcagaaaattcaaagtgtttgcgtttgcacgatagcgtaaaaatgttaaaatataataaagagttaccaataaagaggtttaaggagagattactatgattagatttgaaattcatggagataacctcactatcacagatgctattcgcaactatattgaggaaaaaattggtaagttggaacgttattttaatgacgtaccaaatgcagtggcgcatgttaaagttaaaacttattcaaattcagctactaaaattgaagtaacaattccattgaaaaatgttacgttaagagctgaagagcgaaacgatgatttatacgcaggtattgatttaattaataataaacttgaaagacaagttcgaaaatataaaacacgtattaatcgtaagagccgtgatcgaggagatcaagaagtgtttgttgccgaattacaagaaatgcaagaaacacaagttgataatgacgcttacgatgataacgagatagaaattattcgttcaaaagaattcagcttaaaaccaatggattcagaagaagcggtattacaaatgaatctattaggtcatgacttctttgtattcacagacagagaaactgatggaacaagtatcgtttaccgccgtaaagacggtaaatatggcttgattcaaactagtgaacaataaattaagtttaaagcacttgtgtttttgcacaagtgcttttttatactccaaaagcaaattatgactatttcatagttcgataatgtaatttgttgaatgaaacatagtgactatgctaatgttaatggatgtatatatttgaatgttaagttaataatagtatgtcagtctattgtatagtccgagtcgaaaatcgtaaaatatttataatataatttattaggaagtataattgcgtattgagaatatatttattagtgataaacttgttgacaacagaatgtgaatgaagtatgtcataaatatatttatattgattctacaaatgagtaaataagtataattttctaactataaatgataagatatattgttgtaggccaaacagttttttagctaaaggagcgaacgaaatgggatttttatcaaaaattcttgatggcaataataaagaaattaaacagttaggtaaacttgctgataaagtaatcgctttagaagaaaaaacggcaattttaactgatgaagaaattcgtaataaaacgaaacaattccaaacagaattagctgacattgataatgtcaaaaagcaaaatgattatttagataaaattttaccagaagcatatgcacttgttagagaaggctctaaacgtgtattcaatatgacaccatataaagttcaaattatgggtggtattgcaattcataaaggtgatatcgctgagatgagaacaggtgaaggtaaaacattaacagcgacaatgccaacatacttaaatgcattagctggtagaggtgttcacgttattacagtcaatgaatacttatcaagtgttcaaagtgaagaaatggctgagttatataacttcttaggtttgactgtcggattaaacttaaacagtaagacgacagaagaaaaacgtgaagcatacgcacaagacattacttacagtactaataatgagctaggttttgattacttacgagataacatggtgaattattctgaagatagagtaatgcgtccattacattttgcaatcattgatgaggttgactcaattttaatcgacgaggcacgtacgccattaattatttctggtgaagctgaaaagtcaacgtcactttatacacaagcaaatgtttttgcgaaaatgttaaaacaggacgaagattataaatacgatgaaaaaacgaaagctgtacatttaacagaacaaggtgcggataaagctgaacgtatgttcaaagttgaaaacttatatgatgtacaaaatgttgatgttattagtcatatcaacacagctttacgtgcgcacgttacattacaacgtgacgtagactatatggttgttgatggcgaagtattaattgtcgatcaatttacaggacgtacaatgccaggccgtcgtttctcggaaggtttacaccaagctattgaagcgaaggaaggcgttcaaattcaaaatgaatctaaaactatggcgtctattacattccaaaactatttcagaatgtacaataaacttgcgggtatgacaggtacagctaaaactgaagaagaagaatttagaaatatttataacatgacagtaactcaaattccgacaaataaacctgtgcaacgtaacgataagtctgatttaatttacattagccaaaaaggtaaatttgatgcagtagtagaagatgttgttgaaaaacacaaggcagggcaaccagtgctattaggtactgttgcagttgagacttctgaatatatttcaaatttacttaaaaaacgtggtatccgtcatgatgtgttaaatgcgaaaaatcatgaacgtgaagctgaaattgttgcaggcgctggacaaaaaggtgccgttactattgccactaacatggctggtcgtggtacagatatcaaattaggtgaaggcgtagaggaattaggcggtttagcagtaataggtacagagcgacatgaatctcgtcgtattgatgaccagttacgtggtcgttctggacgtcaaggtgataaaggggatagtcgcttctatttatcattacaagatgaattaatgattcgttttggttctgaacgtttacagaaaatgatgagccgactaggtttagatgactctacaccaattgaatcaaaaatggtatcaagagctgtagaatcagcacaaaaacgtgtagaaggtaataacttcgacgcgcgtaaacgtatcttagaatacgatgaagtattacgtaaacaacgtgaaattatctataacgaaagaaatagtattattgatgaagaagacagctctcaagttgtagatgcaatgctacgttcaacgttacaacgtagtatcaattactatattaatacagcagatgacgagcctgaatatcaaccattcatcgactacattaatgacatcttcttacaagaaggtgacattacagaggatgatatcaaaggtaaagatgctgaagatattttcgaagtcgtttgggctaagattgaagcagcatatcaaagtcaaaaagatatcttagaagaacaaatgaatgagtttgagcgtatgattttacttcgttctattgatagccattggactgatcatatcgacacaatggatcaattacgtcaaggtattcacttacgttcttatgcacaacaaaatccattacgtgactatcaaaatgaaggtcatgaattatttgatatcatgatgcaaaatattgaagaagatacttgtaaattcattttaaaatctgtagtacaagttgaagataatattgaacgtgaaaaaacaacagagtttggtgaagcgaagcacgtttcagctgaagatggtaaagaaaaagtgaaaccgaaaccaatcgttaaaggcgatcaagttggtcgtaacgatgattgtccatgtggtagtggtaaaaaattcaaaaattgccatggaaaataaatgatataaaataactccttccaattaaacacctatagtttgtgttatgggaggagtctttttattttacaagcgttaaatactttaaaaaatgtgaagaagttgttaaacgttgttatgtacttagttttaaaaaatcggtttaggcatatgtcgatgataaatgtactgatttttaacaataaatgcataaactaattgtcagtgtgcttatatttcttaacattgttatttaacaaaattatgttaaaatttagcattataaaagatgcaaatcaatgacttgaattgaaatataaataggagcgaatgctatggaattatcagaaatcaaacgaaatatagataagtataatcaagatttaacacaaattagggggtctctttgacttagagaacaaagaaactaatattcaagaatatgaagaaatgatggcagaacctaatttttgggataaccaaacgaaagcgcaagatattatagataaaaataatgcgttaaaagcaatagttaatggttataaaacactacaagcagaagtagatgacatggatgctacttgggatttattacaagaagaatttgatgaagaaatgaaagaagacttagagcaagaggtcattaattttaaggctaaagtggatgaatacgaattgcaattattattagatgggcctcacgatgccaataacgcaattctagagttacatcctggtgcaggtggcacggagtctcaagattgggctaatatgctatttagaatgtatcaacgttattgtgagaagaaaggctttaaagttgaaactgttgattatctacctggggatgaagcggggattaaaagtgtaacattgctcatcaaagggcataatgcttatggttatttaaaagctgaaaaaggtgtacaccgactagtacgaatttctccatttgattcatcaggacgtcgtcatacatcatttgcatcatgcgacgttattccagattttaataatgatgaaatagagattgaaatcaatccggatgatattacagttgatacattcagagcttctggtgcaggtggtcagcatattaacaaaactgaatcggcaatacgaattacccaccacccctcaggtatagttgttaataaccaaaatgaacgttctcaaattaaaaaccgtgaagcagctatgaaaatgttaaagtctaaattatatcaattaaaattggaagagcaggcacgtgaaatggctgaaattcgtggcgaacaaaaagaaatcggctggggaagccaaattagatcatatgttttccatccatactcaatggtgaaagatcatcgtacgaacgaagaaacaggtaaggttgatgcagtgatggatggagacattggaccatttatcgaatcatatttaagacagacaatgtcgcacgattaatatatattttaaaaccgaggctctaaaagggcgtcggtttttggtttttttaaaggtagctaaataaattgtaaattagattttggaatatgatttgtttatgaatatttaagtacaattcggtagatagagttagaatatattttttaaaagttgtgtttgttaaaacaacatatgcagtgtgcatttagtaatattacctatggcgattttcaaggtattgaattaattattgaaaacgttctcaattacatggtatgaatacattttacactatgataaaaggttgtattctttttatattgttaaccatttgattacatcgttataacaatagcttttgacaaaatgtattgtgctatagtatttgcatacttaaaatactaacagcaaaggaatgacagcaagatgaaaaaatctcttacagtgacggtttcgtcagtgttagcttttttagctttaaataatgcagcacatgcacaacaacatggcacacaagtaaaaacacctgttcaacataattatgtatcaaatgttcaagcacaaacgcaatcaccgacaacttatacagtagttgctggcgattcattatataagattgctttagagcatcacttaacgttgaatcaattatattcatacaatcctggtgtaacacctttaatttttcctggtgacgtgatttcacttgtgcctcaaaataaagtgaaacaaactaaagcggttaaatcaccagtaagaaaagcaagccaagctaaaaaggtagtaaaacaacctgtacaacaagcatctaaaaaagtagtagttaagcaagcacctaagcaagcagtaactaagacagttaatgtagcatacaaacctgctcaagtacaaaaatcagtaccaactgtacctgttgcacataactacaataaatcagttgctaacagaggaaacttatatgcttatggaaactgcacatattatgctttcgatcgtcgtgcacaattaggtagaagtataggaagtttatggggcaatgcaaataactggaattacgcagcaaaagttgcaggatttaaagtagataaaacaccagaagttggcgctattttccaaacagctgctggtccatatggacatgttggtgttgttgaatctgtaaaccctaatggaacaattactgtttctgaaatgaactatgctggatttaatgttaaatcttcaagaacaattttaaatccaggaaaatataattacatccactaagtaatatatcaagacaagactatcctcttagcctgtttaagtaacaggttgagaggattttttggtatcatttaatcagagttatataaagaagatatttaaatgatatttaattgattgatatgtaaaaagaaagtataatttatgattaattaatggaggaggtaattgaaatgggtgtacatcaatattttaaaagattatcagatatggaaagacttataagattacctggaaaatttaaatattttgaacacaatgttgcagcacactcctttaaagtaactaaaattgcacaatatctagcaacagttgaagaatatcatggacgaaagattaattggaaaagcttatatgaaaaagcattaaatcatgatttcgccgaagtgtttactggtgatataaaaacacctgttaaatatgcgagtagtgaattaaaaaaattattttcgcaagttgaagaagaaatggtagagacctttattgaagaagaaattccattacaatatagagatgtttataagcaacgactgcaagaaggtaaagatgattcattagaaggccaaatactttcagttgctgataaaattgatttgctttatgaaacatttggagaaatacaaaaacgtaatcccgaagaattatttttcgaaatttatgaaatgagtctagaaacaattattcaatttgaccatttagcatctgtacaagattttattaataatatcattccagaaatgttgactgaaaactttatacctagaacagaattaagagaaacaaccatgaacattttaaataaaagaaaagaggaaaatgaatgatatggtattttagcgcagcattctttccatgtgtcttggtagtattatttagtgtaataacaagaagtaaatgggtcggtactattctgacattaattttaattggtgcctcaatctataaagagtatttccataacgagtggattatttttattgatgtagtgtcattattagctggttatttaattatagatcaactcgaatttcataaacatcaagatgaagatcgctaagattaactttaaaataatgtttcaaacaaatttgttgaaacaaaatgatgattaatataatgtgtatttacatactaaaaataacaagataaacgatttgatttaaggcaagcatagttagcacaactatgtttgtttttctttgttcgacatttttacgaacaaacgtttgctttttgtgtgactactttgctaaaatatgtaatgagaaagcaaagagttgagcggaaatataaataatacgttgaaagaggaggcatatgtgacaatggttgaacattatccttttaaaatacattctgattttgagcctcaaggtgaccaaccgcaagcaattaaagaaatcgtggaaggtattaaagcggggaaaagacatcaaactttattaggtgctactggcacagggaaaacatttacgatgagtaatgttattaaagaagttgggaaaccaacgttaattatcgcgcataacaaaacattagcaggacaattatatagtgagtttaaagaattttttcctgaaaacagggtggaatactttgtaagttactatgattattatcaaccagaggcatacgtaccgtctactgacacttttattgaaaaagatgcctcaatcaatgatgaaattgatcaactacgacattctgctacaagtgcattatttgaacgcgatgatgtaattattattgctagtgtaagttgtatatatggtttaggtaatcctgaagaatataaagatttagtagtaagtgttcgagttggtatggaaatggatagaagtgaattacttagaaaacttgtagatgtgcaatatacacgaaatgacatcgatttccaacgaggaacgtttcgagtgcgtggtgatgtagtggaaatattcccagcctctaaagaagaactttgtataagggttgagtttttcggcgatgagattgaccgtatccgagaagttaactacctaacaggtgaagtgttgaaagaaagagaacattttgcgatattcccagcttctcacttcgtaacacgtgaagaaaagttgaaagttgcgattgaacgtattgaaaaagaattggaagaacgattgaaagaattacgagatgagaataaattactagaagcgcaaaggttagaacagcgtaccaactatgatttagaaatgatgcgagagatgggattctgttcaggaattgaaaactattccgtacatttaactttgcgaccactgggttcgacaccatatactttattggattactttggcgatgattggttagtaatgattgatgaatcacatgtgacattaccgcaagttcgaggcatgtataacggagacagagcgcgtaaacaagttttggtggatcatgggtttagattaccgagtgcattagataaccgtccacttaaatttgaagaatttgaagaaaagacaaaacaacttgtgtatgtatctgcaacgcctggaccatacgaaattgaacatacggataagatggttgaacaaattattcgtcctactggtttactggatcctaagattgaggttagacctactgaaaatcaaattgacgatttattaagtgaaattcaaacaagagttgagcgtaatgaacgcgtacttgttacaacgctcactaaaaagatgagtgaagatttaaccacatacatgaaagaagcgggtattaaagttaattatctgcattcagaaatcaagacattagaacgaattgaaataattagagacttacgaatgggtacatatgatgttatcgtaggtattaatttattaagagagggtattgatataccagaagtttctctagttgtcatattagatgcagataaagaagggtttttacgttctaaccgctcattaattcaaacaataggtagagctgtgcgtaacgataaaggtgaagtcattatgtatgccgataaaatgactgattcgatgaagtatgcaattgatgagacacaacgtcgtcgagaaatacagatgaaacataatgaaaaacatggtattacacctaaaacaattaataaaaaaatacatgatttaattagtgctactgttgaaaatgacgaaaataatgacaaagcacaaactgtgatacctaagaagatgacgaaaaaagaacgtcaaaagacaatcgacaatatagaaaaagaaatgaaacaagcagcgaaagatttagatttcgagaaagctacagaattaagagatatgttatttgaattaaaagcagaagggtgacaagtaaatgaaagaaccatccatagtagtaaaaggtgctcgtgcgcataacttgaaagatattgatatcgaactacctaaaaataaattaattgttatgacaggtttatctgggtcaggtaaatcgtcattagcattcgatactatatatgctgaaggacaacgacgttatgttgaatcattaagtgcctatgcgcgtcaatttttaggccaaatggacaaaccagatgttgatacaattgaaggattatcgccagcaatttcaatagatcaaaaaacaacaagtaaaaatccaagatcaactgtagcaacagtaacagaaatatatgattatatacgtttgttatatgcacgtgttggtaaaccttactgtccaaatcacaatatagaaattgaatcgcaaacagtacaacaaatggttgaccgcattatggaattagaggcacgtacaaagattcaattattagcacctgtcatcgctcatcgtaaaggtagtcatgaaaagctaatcgaagatattggtaaaaaaggttatgtacgtttaagaatcgatggcgaaattgttgatgtaaatgatgtacctactttagataagaacaagaatcatacaatagaagttgttgtagaccgattagttgttaaagatggaattgaaacacgactagctgactctatagaaactgccttagagctttcagaaggacaattaacagtcgatgtcattgacggggaagaccttaagttttcagaaagccatgcttgtcctatatgtggattttcaatcggagagttagaaccaagaatgtttagctttaacagtccttttggtgcttgtccgacatgtgatggcttaggccaaaagttaacagtcgatgtagacttggttgttcccgacaaagataagacgctaaacgaaggtgcaatagaaccttggataccgacgagttctgatttttatccaacattgttaaaacgtgtttgtgaagtttataaaatcaatatggataaaccttttaaaaagttaacagaacgtcaacgtgatattttattgtatggttctggtgacaaagaaattgaatttacatttacacaacgtcaaggtggtactagaaaacgaacaatggttttcgagggtgtagttcctaatataagtagacgattccatgaatctccttcagaatatacacgtgaaatgatgagtaaatatatgactgaactaccttgcgaaacttgtcatggaaagcgattgagtcgtgaagcgttatctgtttatgtaggtggtttaaatattggtgaagtagtcgaatattcaatcagtcaagcgctgaactattataaaaacattgatttgtcagaacaagatcaagcgattgcaaatcaaatattgaaagaaattatttcccgactcacttttttaaataatgtgggacttgaatatttaacgttaaacagagcttcaggtacactttcaggtggtgaagcacaacgtattcgattagcaacgcaaattgggtcgcgtttgactggtgtcttatatgtattagatgagccatcaattggactgcatcaaagagataatgatcgattaattaatacacttaaagaaatgagagatttaggaaatactttaattgtagttgaacacgatgatgatacaatgcgtgcggctgattacttagtggatataggtcctggtgctggtgaacatggagggcagattgtgtctagtggtactcctcaaaaggtaatgaaagataaaaaatcattaacaggacaatacttgagtggtaagaaacgtattgaagtacctgaatatcgcagaccggcttcagatcgtaaaatttctatacgtggagctagaagcaacaatcttaaaggggttgatgtggacataccactatcaatcatgacggttgttacaggtgtatcaggttctggtaaaagctcattagtaaatgaagtattatacaaatcattagctcaaaaaattaataaatctaaagtaaagccaggattgtacgataagattgaaggtattgatcaacttgataaaattattgatattgatcaatcaccaataggtagaacgccacgctctaatccagcaacatatactggtgtgtttgatgatatacgtgatgtgtttgcgcaaacaaatgaagctaaaattcgaggatatcaaaaagggcgttttagttttaatgtaaaaggtggacgctgtgaagcttgtaaaggtgacggtattattaaaattgaaatgcattttttacctgatgtttatgttccttgtgaagtgtgtgatggtaaacgatataatcgtgagacactagaggttacttacaaaggtaaaaatattgctgacattttagaaatgactgttgaagaagcaacacaattttttgaaaatattcctaagattaagcgcaagttacaaacactagttgatgttggtcttggatacgtcacattaggtcaacaagctacaacgttatcaggtggtgaggctcaacgtgtgaaacttgcatctgaacttcataaacgttcaactggtaaatctatttatatcctagatgaaccgacaacagggttacatgttgacgatattagtagattattaaaagtattaaaccgattagttgaaaatggtgatactgttgtaattattgaacataacctagatgttatcaaaacagcagactatattatagacttaggtcctgaaggtggtagtggcggtggtactattgttgcgactggcacacccgaagatattgctcagacaaagtcatcatatacaggaaagtatttaaaagaagtacttgaacgagataaacaaaatactgaagataaataagattaaaagaagtgaaggatgttataaatttatccttcgcttctttttattaatttagtaatgaatagtagaaagaaaagatgcgtaaaaagaattatgttaagatagggtcaatctagagtagttaaacataaatcgaactgggagtgggacagaaatgataaagaatcactaatgatttattatgtagtggttctttgtcattagccacagctattgtgtacttaaaaataggaatgcatgagtgcaactcatgcataagaaatactaatttctaaagaaaaagcatttctttatgttggggccccgccaacttgcattgtttgtagaatttcttttcgaaattctttatgttggggccccgccaactaattccaatatatcattgtagagcttaggtcattgatttttggctcggacttttatggcgatatgaaccatgtaaattaagcaagcaataaattaatgattgatattgacttgtaaaataataacaataatgaacaattaatatttattttagcttttcaatgtagattggtgttatatttttgatatgataagaagagatgtaagagtagggataaatacaattgaggtgaacccatgttaacgacagaaaaactagttgaaacattaaagttagatttaatcgctggtgaagaaggactatcgaagccaattaaaaatgctgatatatcaagaccgggcttagagatggcaggttatttttcacattatgcgtcagatagaatacaactattaggaacaacggaactatcgttttacaatttattaccagataaggatcgcgcaggtcgtatgcgtaaactatgcagaccagaaacgcctgcaattattgtgacacgtggattgcagccaccagaagaattagttgaagctgcaaaagaattaaataccccacttatagttgctaaagatgcgactacaagtttaatgagtcgcttaacaacgtttttagagcatgcacttgcaaagacgacatctttacatggtgttttagtagatgtttacggtgttggtgtactaattaccggtgattcaggaataggtaaaagtgagactgcgttggaattagttaaacgtgggcatagattagtagcagatgataatgtagaaatacgtcaaattaataaagatgaactaatagggaaaccaccaaagttaatagaacatctattagaaatacgtggactaggtattatcaatgttatgactttatttggcgcgggttcaatattaactgaaaaacgaattagattaaatattaatttggaaaactggaacaagcaaaagttatatgaccgcgtaggtcttaatgaagagacgctaagtattttagatactgaaatcactaaaaaaacaatacctgtaagacctggtagaaatgttgcggtaattattgaggtcgctgcaatgaactatcgattaaatatcatgggcattaacacggccgaagaatttagtgaaagattaaatgaagaaattatcaagaacagtcataagagtgaggagtaggttgaatgggtattgtatttaactatatagatcctgtggcatttaacttaggaccactgagtgtacgatggtatggaattatcattgctgtcggaatattacttggttactttgttgcacaacgtgcactagttaaagcaggattacataaagatactttagtagatattattttttatagtgcactatttggatttatcgcggcacgaatctattttgtgattttccaatggccatattacgcggaaaatccaagtgaaattattaaaatatggcatggtggaatagcaatacatggtggtttaataggtggctttattgctggtgttattgtatgtaaagtgaaaaatttaaacccatttcaaattggtgatatcgttgcgccaagtataattttagcgcaaggaattggacgctggggtaactttatgaatcacgaggcacatggtggatcggtgtcacgcgcttttttagaacaattacatttgcctaattttataatagaaaatatgtatattaacggccaatattatcatccaacattcttatatgaatccatttgggatgtcgctggatttattatcttagttaatattcgtaaacatttaaaattaggagaaacattctttttatatttaacttggtattcaattggtcgattctttatagaaggattacgtacagatagcttaatgctcacaagtaatattagagttgcacaattagtatcaattcttttaattttaataagtataagtttaattgtatatagaaggattaagtataatccaccgttgtatagcaaagttggggcgcttccatggccaacaaaaaaagtgaagtagtgatagtttgaggaaatttttatcaaaaacacatcatcatacaaaccctttatggcgtgtataccgtcttgttaaattttcgaaagtttttaagaatgtaattatcattgaattttcgaaatttattccaagtatggtactgaaaagacatatatataaacaacttttaaatattaatatcggtaatcaatcgtcgatagcttataaagtaatgttagatattttttacccagaactgattacgattggtagtaacagtgttattggttacaatgtaacaattttgacgcatgaagcattagttgatgaatttcgttatggaccagtgacgataggatctaacactttgattggtgcaaatgctaccattttacccggtataacgattggtgacaatgtaaaagttgcagctggtacggttgtttcaaaagatataccggataatggatttgcatatggcaaccctatgtatataaaaatgattaggaggtgacaattttatggcgcaaaagaataataatgtaattccaatgacttttgatgatgcattttatcgtaaaatggctaaacagaagtttaaacaaagagaatataaacgagctgctgaatactttgaaaaagtgttagaattgtcacctgatgatatggaaattcaaattgattatgcacaatgtctagtgcaacttggtattgctaaaaaagcagaacatttattttatgacaatattatttataataggcatctagaagatagcttttatgaattgagtcagctcaacattgaagttaacgaaccaaacaaggcattcttgtttggtattaattatgttattgttagcgacgaccaagattatagagatgaattagatcaaatgtttgatgtgaaatatcaaagtgaagaacaaattgaacttgaagctcaattgtttgtagttcaaatactattccaatatcttttttctcaaggtcgattaaaagatgcaaagaattatgtcttacatcaaccacaagaagttcaagatcatcgtgtagtacgtaatttattggcaatgtgttatttatatctcggtgaatatgatacggctaaagcattgtacgaagcactattacaagaggatagtacagatatatatgcattatgccattatactttgctactttataacactaaggaaaatgaacaatatcaaaaatatttaaaaatattaaacaaagttgtacctatgaatgacgatgaaagttttaaattaggtattgtattaagttatttaaagcagtatcgtgcatcacaacaattgttgtaccctttatataaaaaagggaaatttttatcaattcaaatgtacaatgctttagcatataattattattatttaggtgaagaagacgaaagtcattactactgggataaattgaagcaaatttctaaagtggaaattggacatgcgccttgggtaattgaaaatagcaaagaagtttttgaccaacatattttgccattacttcaaagtgatgacagtcattatcgtttatatggtatttttttattggatcaattaaatggtaaagaaattgtgatgacggaaagtatttggcaggttttggaaaatctaaataattatgagaaattgtatttaacgtatttagttcaaggtttaacgctcaataaattagacttcattcatcgcggcttattaacgctttaccataatgaattatttgtaagtgaaaatgatgtaatggttgcatggattaatcaaggtgaactcataattgctgaaaaagtagatttaagtgatgttgagccatatatcggtgcgtttatttatttgtattttaaaaatcaacctcgaaacgttacaaagaagcaaattacaacatggttaggcataacacaatataaactgaacaaaatgattgaatttctcttgagcatatagatttatgaaaagttagatttattatataatgcgcataatgattaataatgaggaggcgttaataaaatgactgaaatagattttgatatagcaattatcggtgcaggtccagctggtatgactgctgcagtatacgcatcacgtgctaatttaaaaacagttatgattgaaagaggtattccaggcggtcaaatggctaatacagaagaagtagagaacttccctggtttcgaaatgattacaggtccagatttatctacaaaaatgtttgaacacgctaaaaagtttggtgcagtttatcaatatggagatattaaatctgtagaagataaaggcgaatataaagtgattaactttggtaataaagaattaacagcgaaagcggttattattgctacaggtgcagaatacaagaaaattggtgttccgggtgaacaagaacttggtggacgcggtgtaagttattgtgcagtatgtgatggtgcattctttaaaaataaacgcctattcgttatcggtggtggtgattcagcagtagaagagggaacattcttaactaaatttgctgacaaagtaacaatcgttcaccgtcgtgatgagttacgtgcacagcgtattttacaagatagagcattcaaaaatgataaaatcgactttatttggagtcatactttgaaatcaattaatgaaaaagacggcaaagtgggttctgtgacattaacgtctacaaaagatggttcagaagaaacacacgaggctgatggtgtattcatctatattggtatgaaaccattaacagcgccatttaaagacttaggtattacaaatgatgttggttatattgtaacaaaagatgatatgacaacatcagtaccaggtatttttgcagcaggagatgttcgcgacaaaggtttacgccaaattgtcactgctactggcgatggtagtattgcagcgcaaagtgcagcggaatatattgaacatttaaacgatcaagcttaattcgaagtcgaattaagatgttgagctgtaaattatttggatatttattttaatagtgtcatcacagcgttaaaataatgtcttacttttaaattaaagcaaattatatagaaaactagaacttagtacgtatcatttgtgcgtttcaatgagttctagtttttttatatgttatattaaacttataactttatgggagtgggacagaaatgataaagagccactaatgatttattatgtagtggttcttaaacattagccacagctaatgtgtacttaaaaataggaatacatgagtaaaactcatgcataagaaatactaatttctatagaaaaagtattactttatcgttgtcccaccccaacttgcacattattgtaagctgactttccgccagcttctgtgttggggccccgccaacttgcattgtctgtagaaattgggaatccaatttctctatgttggggcccacaccccaactcgcattgcctgtagaatttcttttcgaaattctctgtgttggggcccacaccccaactcgcattgcctgtagaatttcttttcgaaattctctgtgttggggcccctgactagagttgaaaaaagcttgttgcaagcgcattttcattcagtcaactactagcaatataatattatagaccctaggacattgatttatgtcccaagctccttttaaatgatgtatatttttagaaatttaatctagacatagttggaaataaatataaaacatcgttgcttaattttgtcatagaacatttaaattaacatcatgaaattcgttttggcggtgaaaaaataatggataataatgaaaaagaaaaaagtaaaagtgaactattagttgtaacaggtttatctggcgcaggtaaatctttggttattcaatgtttagaagacatgggatatttttgtgtagataatctaccaccagtgttattgcctaaatttgtagagttgatggaacaaggaaatccatccttaagaaaagtggcaattgcaattgatttaagaggtaaggaactatttaattcattagttgcagtagtggataaagtcaaaagtgaaagtgacgtcatcattgatgttatgtttttagaagcaagtactgaaaaattaatttcaagatataaggaaacgcgtcgtgcacatcctttgatggaacaaggtaaaagatcgttaatcaatgcaattaatgatgagcgagagcatttgtctcaaattagaagtatagctaattttgttatagatactacaaagttatcacctaaagaattaaaagaacgcattcgtcgatactatgaagatgaagagtttgaaacttttacaattaatgtcacaagtttcggttttaaacatgggattcagatggatgcagatttagtatttgatgtacgatttttaccaaatccatattatgtagtagatttaagacctttaacaggattagataaagacgtttataattatgttatgaaatggaaagagacggagattttctttgaaaaattaactgatttgttagattttatgatacccgggtataaaaaagaagggaaatctcaattagtaattgccatcggttgtacgggtggacaacatcgatctgtagcattagcagaacgactaggtaattatctaaatgaagtatttgaatataatgtttatgtgcatcatagggacgcacatattgaaagtggcgagaaaaaatgagacaaataaaagttgtacttatcggtggtggcactggcttatcagttatggctaggggattaagagaattcccaattgatattacggcgattgtaacagttgctgataatggtgggagtacagggaaaatcagagatgaaatggatataccagcaccaggagacatcagaaatgtgattgcagctttaagtgattctgagtcagttttaagccaactttttcagtatcgctttgaagaaaatcaaattagcggtcactcattaggtaatttattaatcgcaggtatgactaatattacgaatgatttcggacatgccattaaagcattaagtaaaattttaaatattaaaggtagagtcattccatctacaaatacaagtgtgcaattaaatgctgttatggaagatggagaaattgtttttggagaaacaaatattcctaaaaaacataaaaaaattgatcgtgtgtttttagaacctaacgatgtgcaaccaatggaagaagcaatcgatgctttaagggaagcagatttaatcgttcttggaccagggtcattatatacgagcgttatttctaacttatgtgtgaatggtatttcagatgcgttaattcattctgatgcgcctaagctatatgtttctaatgtgatgacgcaacctggggaaacagatggttatagcgtgaaagatcatatcgatgcgattcatagacaagctggacaaccgtttattgattatgtcatttgtagtacacaaactttcaatgctcaagttttgaaaaaatatgaagaaaaacattctaaaccagttgaagttaataaggctgaacttgaaaaagaaagcataaatgtaaaaacatcttcaaatttagttgaaatttctgaaaatcatttagtaagacataatactaaagtgttatcgacaatgatttatgacatagctttagaattaattagtactattcctttcgtaccaagtgataaacgtaaataatatagaacgtaatcatattatgatatgataatagagctgtgaaaaaaatgaaaatagacagtggttctaaggtgaatcatgttttaaataagaaaggaatgactgtacgatgagctttgcatcagaaatgaaaaatgaattaactagaatagacgtcgatgaaatgaatgcaaaagcagagctcagtgcactgattcgaatgaatggtgcacttagtctttcaaatcaacaatttgttataaatgttcaaacggaaaatgcaacaacggcaagacgtatttattcgttgattaaacgtgtctttaatgtggaagttgaaatattagtccgtaaaaaaatgaaacttaaaaaaaataatatttatatttgtcgtacaaagatgaaagcgaaagaaattcttgatgaattaggaattttaaaagacggcatttttacgcatgaaattgatcattcaatgattcaagatgacgaaatgagacgcagttacttgagaggagcttttctggcaggtggctcagtgaataaccctgaaacatcttcgtaccatttggaaattttttctcaaaatgagagtcatgcagaaggcttaacgaaactaatgaatagttatgagttgaatgccaaacatttagagcgaaaaaaaggaagtattacgtatttaaaagaagcggaaaagatttcggattttcttagtttgataggtggctatcaagcgttattaaaatttgaagacgtacgtattgtaagagatatgcgtaattctgttaaccgactcgttaattgtgaaacggccaatctaaataaaacagttagtgctgcgatgaaacaagttgagagcattaaattgattgataaagaaattggtattgaaaatttaccagacaggttgagagagattgctagaattcgagtagaacatcaagaaatttcgttgaaagagcttggagaaatggtatcaactggtccaatttcaaaatcaggtgtaaatcaccgattaagaaaactgaatgatttagccgataagattagaaatggtgaacaaatagaattataagtaagaaggtgtttttggtagtgaattatcaaaaacacttttttatgattaaaaagtgtttaatgaataatagtcgactaactattaaattgagctggaaagtttaatgaaggaaattcaataaccaagtgatgcctaattttctcattaaatagcatcatatgtatcaatttggtcataagaaaatatgaatgtgataattaattgagtccctgaaagtccctgatcatagacaaaaacaaaatcagcataaataagaatcccgacattgcgggattctctgtattgaaaagtattgtattttattaaaacagcctccttgaagggaattgaacccctatcttaagaaccggaatcttacgtgttatccattacaccacaaggagcaaatatgtaatcatatctctgtactatgagaagtaaaataagtacaatctaaaatagatattatcagtttacaaaggaaagagaaaagcgtcaaacaatgtaactatttaaagtcaaagtgtttgaccaaatttgacttaatatgtaaaataatgagtaacagttattacaaggaggaaatatagatgaatttaattcctacagttattgaaacaacaaaccgcggtgaacgtgcatatgatatatactcacgtttattaaaagaccgtattattatgttaggttcacaaattgatgacaacgtagcaaattcaatcgtatcacagttattattcttacaagcgcaagactcagagaaagatatttatttatacattaattcaccaggtggaagtgtaacagctggttttgcgatttatgatacaattcaacacattaaacctgatgttcaaacaatttgtatcggtatggctgcatcaatgggatcattcttattagcagctggtgcaaaaggtaaacgtttcgcgttaccaaatgcagaagtaatgattcaccaaccattaggtggtgctcaaggacaagcaactgaaatcgaaattgctgcaaatcacattttaaaaacacgtgaaaaattaaaccgcattttatcagagcgtactggtcaaagtattgaaaaaatacaaaaagacacagatcgtgataacttcttaactgcagaagaagctaaagaatatggcttaattgatgaagtgatggtacctgaaacaaaataattcaaagtaaagagtagactaagctgtctgctctttttgtatgagtaaaccaaggtgtcaataatttgtttactatactttgagcggaaatatgattgaatgaagctagttgaaccgtaactatatgaaatgttcccttcaaagtagacattgaaaggaacatttcaatcctttgtttgtaagtcgctctagacattacatttagtacatatgttgtttctaatgctcattaatggtattgattattctttaattaaatcttcaagtgccatttttaaattactatatttaaattggaatcccaatgcttgaattttattaggtaatactttttgagtatccaatactactgttgacatttgaccaagtatgagacgcattgcaagacttggtgcccaagtttcatgaggcttatgcatagctcttgctaaagtgtagccaaataaattttgacgttcaggtataggtgcagttaaattaaacggaccactagctgactcgttatttattaaaaataaaatagcttgaattaaatcattgatatgaatccatgaataccattgttgaccagaacctaatttaccaccaatgtaatattcgtatggtagtttcattgtttgtaacgcaccgccttcattcgataaaattataccgaaacgaccgatgacaactcgtgtacctaattgttcaaattgttgtgcgaaacgttcccattgatacacaatatctgataagaaatcaaaaggtaaagttttataaacttctgtgtaactcataaataaatcaggaggatagtaaccagtggcactagcattaaataaagctttaggtgctttattacgtgatttaaacaattcatataaagcttgcgtagattgaattctacttagcattagcgtttgtttatattccggtgtccatcgtttattcaatgtagcacctgctaagttgatgaccacatcgatattttgaggaactttgtgttcccacccagatttagcccagttgacatatgaaattttcttatcatttgaaatttggtcgtgtcgcgttaatatcgtgatatgtgaatctgattttttaatttcattaactaattgagatccaaccataccagtcccaccagtaattaagtattgtttcattatcattcaccccatgtaattttgtatttagttactatttaataatcattattgttgttcaaaggttatacattatttagacaataatatgtcaataactttttttgaattgtattttaataaaaatgatataagttataataaaggtgtaccttcgataacgaataaacatctcttaaaagtatgtgtaaaacgctgcatgatacaaacgaaggtaaaaatttgactccctttagtagtggacccgtacgttaatcgtgcgggtcgtttttatttatttcttattcccattatacatcaatttaaagcattaattttttaaacaaatttaagaatacatagtaatataacaatctaaacataaaaacttttaacacaacacttaaaccaatgctttaattttcaatacgtagctataatttgttgtaaaatcaaaaaggttaaaatgttaattttcaaaaaaaggctcaaaatatgtttgatttagttattaaatgttaagatatataagactactatttctttgtaaaaatgaatccgatttacgagtgagtaatagtgaaggcagttttaagttgaagaaggcaaaaagagtaaatgtttattaatatttgtagaaactaggtaagcaaattagttgtgaaaatgttaatggttgcgtgataatttctatatttaaattagtttgaagtgagggagagtatgtcgaatcaaaattacgactacaataaaaatgaagatggaagtaagaagaaaatgagtacaacagcgaaagtagttagcattgcgacggtattgctattactcggaggattagtatttgcaatttttgcatatgtagatcattcgaataaagctaaagaacgtatgttgaacgaacaaaagcaggaacaaaaagaaaagcgtcaaaaagaaaatgcagaaaaagagagaaagaaaaagcaacaagaggaaaaagagcagaatgagctagattcacaagcaaaccaatatcagcaattgccacagcagaatcaatatcaatatgtgccacctcagcaacaagcacctacaaagcaacgtcctgctaaagaagagaatgatgataaagcatcaaaggatgagtcgaaagataaggatgacaaagcatctcaagataaatcagatgataatcagaagaaaactgatgataataaacaaccagctcagcctaaaccacagccgcaacaaccaacaccaaagccaaataataatcaacaaaacaatcaatcaaatcagcaagcaaaaccacaagcaccacaacaaaatagccaatcaacaacaaataaacaaaataatgctaatgataagtagtatttagtcaaacaaaaatgaaccagtatgacagacaacacaattaattaggttgtctcgaatattggttcttatttttataattgttaattaggggagagatgatacttaaatagttagttatttattttacggatagtgaaatttattttgagtgaggtgggacagaaatgatattttcgcaaaatttatttcgtcgtcccaccccaacttccattgcctgtagaaattggaaatccaatttctctatgttggggcccctgactttaattgaaaaaagcttgttacaagtgcattttcgttcggttaactactactaatgtgactttttggattctagagcattgatttatgtcctagtctcaaataataagcaaatgattatcgagtcagtataagggtatacatttgactacagcgaataaaataaaacgttttgttgaataacaaatcgaaaatatattgcaagcgctttatcaaattatttagaaaatttaagttttatgcttgcaatttttgaaatagaatagtactattgcaagtgtaaagaggttaatttttgtcccacgcgggacttaaaaaggcaaccactggttgtgacatatccttatttacatttataaatataaggaggaggtagtagtgaaagacttattgcaagcacagcaaaagcttataccggatctcatagataaaatgtataaacgtttttctattcttactactatctcaaaaaatcagcctgtcggacgtcgaagtttaagcgaacatatggatatgactgaacgtgtactgcgttctgaaacagatatgcttaagaaacaagatttgataaaagttaagcctaccggaatggaaattacagctgaaggtgagcaactgatttcgcaattgaaaggttactttgatatctatgcagatgataatcgtctgtcagaaggtattaagaataaatttcaaattaaggaagttcatgttgttcctggtgatgctgataatagtcaatctgttaaaacagaattaggtagacaagcaggtcaattacttgaaggcatattacaagaagacgcgatagttgctgtaactggcggatccacgatggcatgtgttagtgaagcaattcatttattaccatataatgtattcttcgtaccagccagaggtggactaggcgaaaatgttgtctttcaggcaaacacaattgcagccagtatggcacaacaagctggcggttattatacgacgatgtatgtacctgataatgtcagtgaaacaacatataatacattgttgttagagccatcagtcataaacactttagacaaaattaaacaagcaaacgttatattacacggcattggtgatgcgctgaagatggcgcatcgacgtcaatcacctgaaaaggtcattgaacaacttcaacatcatcaagctgtcggagaggcatttggttattattttgatacacaaggtcaaattgtccataaggttaaaacaattggacttcaattagaagaccttgaatcaaaagactttatttttgcagttgcaggaggcaaatcgaaaggtgaagcaattaaagcatacttgacgattgcacccaagaatacagtgttaatcactgatgaagccgcagcaaagataatacttgaataagagataaaaagtttaatactttttaaatatcattttaaaggaggccattataatggcagtaaaagtagcaattaatggttttggtagaattggtcgtttagcattcagaagaattcaagaagtagaaggtcttgaagttgtagcagtaaacgacttaacagatgacgacatgttagcgcatttattaaaatatgacactatgcaaggtcgtttcacaggtgaagtagaggtagttgatggtggtttccgcgtaaatggtaaagaagttaaatcattcagtgaaccagatgcaagcaaattaccttggaaagacttaaatatcgatgtagtattagaatgtactggtttctacactgataaagataaagcacaagctcatattgaagcaggcgctaaaaaagtattaatctcagcaccagctactggtgacttaaaaacaatcgtattcaacactaaccaccaagagttagacggttctgaaacagttgtttcaggtgcttcatgtactacaaactcattagcaccagttgctaaagttttaaacgatgactttggtttagttgaaggtttaatgactacaattcacgcttacacaggtgatcaaaatacacaagacgcacctcacagaaaaggtgacaaacgtcgtgctcgtgcagcggcagaaaacatcatccctaactcaacaggtgctgctaaagctatcggtaaagttattcctgaaatcgatggtaaattagatggtggtgcacaacgtgttcctgtagctacaggttcattaactgaattaacagtagtattagaaaaacaagacgtaacagttgaacaagttaacgaagctatgaaaaatgcttcaaacgaatcattcggttacactgaagacgaaatcgtttcttcagacgttgtaggtatgacttacggttcattattcgacgctacacaaactcgtgtaatgtcagttggcgaccgtcaattagttaaagttgcagcttggtatgataacgaaatgtcatatactgcacaattagttcgtacattagcatacttagctgaactttctaaataattttagtatagtttttattcaaatacgctagtgctcagaactatttagcattaattaaagcttatgagtaagcggggagcacaaacgcttctccgcttatttttatataaaatttcctaattacaaggaggaaacaccatggctaaaaaaattgtttctgatttagatcttaaaggtaaaacagtcctagtacgtgctgattttaacgtacctttaaaagacggtgaaattactaatgacaaccgtatcgttcaagctttacctacaattcaatacatcatcgaacaaggtggtaaaatcgtactattttcacatttaggtaaagtgaaagaagaaagtgataaagcaaaattaactttacgtccagttgctgaagacttatctaagaaattagataaagaagttgttttcgtaccagaaacacgcggcgaaaaacttgaagctgctattaaagaccttaaagaaggcgacgtattattagttgaaaatacacgttatgaagatttagacggtaaaaaagaatctaaaaatgatccagaattaggtaaatactgggcatctttaggtgatgtgtttgtaaatgatgcttttggtaccgcgcatcgtgagcatgcatctaatgttggtatttctacacatttagaaactgcagctggattcttaatggataaagaaattaagtttattggcggcgtagttaacgatccacataaaccagttgttgctattttaggtggagcaaaagtatctgacaaaattaatgtcatcaaaaacttagttaacatagctgataaaattatcatcggcggaggtatggcttatactttcttaaaagcgcaaggtaaagaaattggtatttcattattagaagaagataaaatcgacttcgcaaaagatttattagaaaaacatggtgataaaattgtattaccagtagacactaaagttgctaaagaattttctaatgatgccaaaatcactgtagtaccatctgattcaattccagcagaccaagaaggtatggatattggaccaaacactgtaaaattatttgcagatgaattagaaggtgcgcacactgttgtatggaatggacctatgggtgtattcgagttcagtaactttgcacaaggtacaattggtgtatgtaaagcaattgcaaaccttaaagatgtaattacgattatcggtggcggtgattcagctgcagcagcaatctctttaggttttgaaaatgacttcactcatatttcaactggtggcggcgcgtcattagagtacctagaaggtaaagaattgcctggtatcaaagcaatcaataataaataataaagtgatagtttaaagtgatgtggcatgtttgtttaacattgttacgggaaaacagtcacaagatgacatcgtgtttcatcacttttcaaaaatatttacaaaacaaggagtgtctttaatgagaacaccaattatagctggtaactggaaaatgaacaaaacagtacaagaagcaaaagacttcgtcaatgcattaccaacattaccagattcaaaagaagtagaatcagtaatttgtgcaccagcaattcaattagatgcattaactactgcagttaaagaaggaaaagcacaaggtttagaaatcggtgctcaaaatacgtatttcgaagataatggtgcgttcacaggtgaaacgtctccagttgcattagcagatttaggcgttaaatacgttgttatcggtcattctgaacgtcgtgaattattccacgaaacagatgaagaaattaacaaaaaagcgcacgctattttcaaacatggaatgactccaattatatgtgttggtgaaacagacgaagagcgtgaaagtggtaaagctaacgatgttgtaggtgagcaagttaagaaagctgttgcaggtttatctgaagatcaacttaaatcagttgtaattgcttatgaaccaatctgggcaatcggaactggtaaatcatcaacatctgaagatgcaaatgaaatgtgtgcatttgtacgtcaaactattgctgacttatcaagcaaagaagtatcagaagcaactcgtattcaatatggtggtagtgttaaacctaacaacattaaagaatacatggcacaaactgatattgatggggcattagtaggtggcgcatcacttaaagttgaagatttcgtacaattgttagaaggtgcaaaataatcatggctaagaaaccaactgcgttaattattttagatggttttgcgaaccgcgaaagcgaacatggtaatgcggtaaaattagcaaacaagcctaattttgatcgttattacaacaaatatccaacgactcaaatcgaagcgagtggcttagatgttggactacctgaaggacaaatgggtaactcagaagttggtcatatgaatatcggtgcaggacgtatcgtttatcaaagtttaactcgaatcaataaatcaattgaagacggtgatttctttgaaaatgatgttttaaataatgcaattgcacacgtgaattcacatgattcagcgttacacatctttggtttattgtctgacggtggtgtacacagtcattacaaacatttatttgctttgttagaacttgctaaaaaacaaggtgttgaaaaagtttacgtacacgcatttttagatggccgtgacgtagatcaaaaatccgctttgaaatacatcgaagagactgaagctaaattcaatgaattaggcattggtcaatttgcatctgtgtctggtcgttattatgcaatggatcgtgacaaacgttgggaacgtgaagaaaaagcttacaatgctattcgtaattttgatgccccaacttatgcaactgccaaagaaggtgtagaagcaagctataatgagggcttaactgacgaattcgtagtaccattcatcgttgagaatcaaaatgacggtgttaatgatggagatgcagtgatcttctataatttccgacctgatagagcagcgcaattatcggaaatttttgcgaacagagcattcgaaggctttaaagttgaacaagttaaagacttattctatgcaacattcactaagtataatgacaatatcgatgcggctatcgtcttcgaaaaagttgatttaaataatacaattggtgaaattgcacaaaataacaatttaactcaattacgtattgcagaaactgaaaaataccctcacgttacttactttatgagtggtggacgtaacgaggaatttaaaggtgaacgccgtcgtttaattgattcacctaaagttgcaacgtatgacttgaaaccagaaatgagtgcttatgaagttaaagatgcattattagaagagttaaataaaggtgacttggacttaattattttaaactttgctaaccctgatatggttggacatagtggtatgcttgagccgacaatcaaagcaatcgaagcggttgatgaatgtttaggagaagtggttgataagattttagacatggacggttatgcaattattactgctgaccatggtaactctgatcaagtattgacggatgatgatcaaccaatgactacgcatacaacgaacccagtaccagtgattgtaacaaaagaaggcgttacacttagagaaactggtcgcttaggtgacttagcacctacattattagatttattaaatgtagaacaacctgaagatatgacaggtgaatctttaattaaacactaatattgtaaaagatgttaagtaaacgcttaatgacacttattttttgaaaataatagtaatatcattttgttaaatgaaagaataaagctataataattatagaataactatttaaaggagattataaacatgccaattattacagatgtttacgctcgcgaagtcttagactctcgtggtaacccaactgttgaagtagaagtattaactgaaagtggcgcatttggtcgtgcattagtaccatcaggtgcttcaactggtgaacacgaagctgttgaattacgtgatggagacaaatcacgttatttaggtaaaggtgttactaaagcagttgaaaacgttaatgaaatcatcgcaccagaaattattgaaggtgaattttcagtattagatcaagtatctattgataaaatgatgatcgcattagacggtactccaaacaaaggtaaattaggtgcaaatgctattttaggtgtatctatcgcagtagcacgtgcagcagctgacttattaggtcaaccactttacaaatatttaggtggatttaatggtaagcagttaccagtaccaatgatgaacatcgttaatggtggttctcactcagatgctccaattgcattccaagaattcatgattttacctgtaggtgctacaacgttcaaagaatcattacgttggggtactgaaattttccacaacttaaaatcaattttaagcaaacgtggtttagaaactgcagtaggtgacgaaggtggtttcgctcctaaatttgaaggtactgaagatgctgttgaaacaattatccaagcaatcgaagcagctggttacaaaccaggtgaagaagtattcttaggatttgactgtgcatcatcagaattctatgaaaatggtgtatatgactacagtaagttcgaaggcgaacacggtgcaaaacgtacagctgcagaacaagttgactacttagaacaattagtagacaaatatcctatcattacaattgaagacggtatggacgaaaacgactgggatggttggaaacaacttacagaacgtatcggtgaccgtgtacaattagtaggtgacgatttattcgtaacaaacactgaaattttagcaaaaggtattgaaaacggaattggtaactcaatcttaattaaagttaaccaaatcggtacattaactgaaacatttgatgcaatcgaaatggctcaaaaagctggttacacagcagtagtttctcaccgttcaggtgaaacagaagatacaacaattgctgatattgctgttgctacaaacgctggtcaaattaaaactggttcattatcacgtactgaccgtattgctaaatacaatcaattattacgtatcgaagatgaattatttgaaactgctaaatatgacggtatcaaatcattctataacttagataaataattttctttataatcaaatgctgacataattttagttgaggattattatgacggtataaattaaataaagattttgagttcacgcttaaataagttcacgcttaaatttatagcctgccacagagttgagactgtggtaggttttttattttgaagtattaatcataacagactaataatcatgaggtaactaataacacatatttaacttgtattcttaaactggtataataaatttatgttgaaatgaatattgtatgacagggtattcacttttattaaaaggtaaaattaaataaaggttttatagaacgtatttaaatatatgaggagtaaacaaatggctgatagaacgaataaagaaattaaaacaggacgctttattgcaactgcatcaatcgtattctcaatattattgattattcattactttgtttcgttggataatgcgactgccaaagcattacttaatttaacgaatcaaaacacttcagataaagcgattgattacattttaaacagctttagattcactggtattatgtatattttggcttatctagcaggcttcatcactttttggaatcgacatacttatgtgtggtggtttatgtttgcagtttatgtatcaaatagtttgtttacgttgattaatttatcaatcacaattcaagcaataaaagctgcacacggtgcgtacttaacattgccaattttaattgttattataggttcggttgcattagcgatttatatgcttgttgtttctatcaaacgtaaaagtacatttaatcgctagaaaattgattttaacaataaaaatatgatatactacttgtcgtatataaggaacggaggacaatttatgcatacatttttaatcgtattattaatcattgattgtattgcattaataactgttgtactactccaagaaggtaaaagcagtggactttcaggtgccatcagtggtggtgctgagcagttattcggtaaacaaaaacaacgtggcgtcgatttattcttaaatagattaacaattattttatcaatattattttttgtacttatgatttgcataagttatcttggtatgtaaggtccggcgatgtaaatgtcgggcttttttatttataattaagaatgtaatagtttaacaataagctatgtaaaatatatagcctagttaagtatgcaaagggagcgttagatttatgcagataaaattaccaaaacctttcttttttgaggaaggtaaacgtgccgtgttattactacatggttttacaggcaattcgtctgatgttcgtcaattaggtcgatttttacaaaagaaaggttatacatcatatgcaccgcaatatgaaggccacgcggcaccaccagatgaaatactgaaatctagtcctttcgtttggtttaaagatgcgttagatggttatgattatcttgttgaacaaggttatgatgaaattgttgttgctggtctatcattaggtggggattttgctttaaaattaagcttaaatagagatgtaaagggtattgtaacgatgtgtgctcctatgggtggcaaaactgaaggtgccatttatgaaggctttttagaatatgcacgcaattttaaaaagtatgaaggtaaagatcaagagactattgataatgaaatggatcattttaaaccaactgaaactttaaaagaactaagtgaagcattagatacgattaaagagcaagttgatgaagtgttggatcctattttagtgattcaagcagaaaacgacaatatgattgatccacaatccgcaaattatatatatgaccatgtagattctgatgacaaaaatatcaagtggtacagtgaatctggacatgttattacgattgataaagagaaagaacaagtatttgaagatatttatcaatttttagagtcattagactggtcagaataaaaagagattttaacattagaaaggaggggcataatgaatttaaagcaatctatagaagagattattaatcaacctgaatatgaacctatgtcagtgtcagattttcaagatgcattaggtttaagcagtgccgactcgtttagagatttaattaaggtgcttgtggagttagaacaatcaggattaatcgaacgtacaaaaacagacagataccaaaaaaagcatagttatagaggtcaatcaaaattgataaaaggaacgttaagtcaaaataaaaaaggctttgcattcttaagacctgaagatgaggatatggaagatatatttattcccccgacgaaaattaatcgtgccttggatggagatactgttattgtagaaatccatcaatcaaaaggtgaacataaaggtaaaatcgaaggggaagttaagtcgattgagaagcattctgtaactcaagttgttggtacgtatagtgaagctagacattttggctttgttattccggatgataaacgtattatgcaagatattttcattcctaaaggtcaaagtttaggcgcagtcgatggtcataaggtacttgtacaaattactaagtatgctgatggttcagataatccagaaggacatatttctgctattttaggacataaaaatgatcctggcgtagatattttatctattatctatcaacatggcatagaaattgaatttcctgatgaagtgttacaagaagctgaagcagtacctgatcatattgaaaatactgaaattaaaggccgtcatgatttacgtgatgaattgacaatcacaattgatggtgctgatgctaaagacttagatgacgcaattagtgttaaaaagttagcgaacggtaatacgcaattaactgtaagtattgctgatgtcagctattatgtaacagaaggttctgcattggataaagaggcatatgatagagcgacaagtgtatatcttgttgaccgtgtaattccaatgattccacatcgattaagtaatggtatttgttcattgaatcctaatgttgatcgtttaactctaagctgtcgcatggaaatcgatgctagtggtcgcgttgttaaacatgaaatttttgatagtgttatacattctgattatcgaatgacgtatgatgcggtaaatcagattattactgaaaaggatcctaacattcgcgaacaatataatgaaattacgcctatgctagatttagcacaagatttatctaatcgtttgattcaaatgagaaaacgacgtggtgaaatcgattttgatattagtgaagcaaaagtattagttaacgaagacggtataccaacagatgttcaattaagacaacgtggcgagggtgaacgtctaattgaatcatttatgttaattgcaaatgaaacagttgctgaacattttagtaagttagatgtaccttttatttaccgagtgcatgagcaacctaaatcagatcgcttaagacaattctttgattttattacaaactttggcatcatgattaagggtactggcgaagatattcatccaacaacacttcaaaaggttcaagaagaagtagaaggtcgacctgaacaaatggtcatttcaacaatgatgttgcgttcaatgcaacaagcgcattatgatgatgtgaacttgggacattttggcttatcagctgaatattatacgcattttacatcaccaattagacgttatcctgatttaacagttcatcgtttaatccgtaagtatttaattgagaaatcaatggataacaaagaagtgaagcgttgggaagacaaattgcctgagttagctgaacatacttctaaacgtgaacgtcgtgctattgaggcagaacgtgatactgatgaattgaaaaaagcagaatatatgattcaacatattggtgatgaatttgaaggtattgtcagctcagtagctaacttcggtatgttcattgaattgccaaatacgatagaaggtatggttcatattgcgaatatgactgatgattattaccgttttgaagagcgtcaaatggcattaattggtgagcgtcaagctaaagtatttagaattggtgacacagttaaggttaaagtgacgcatgttgatgtagatgaacgattaattgattttcaaattgtaggtatgcctttaccgaaaaatgatcgatcacagcgcccagcgcgaggtaagacaattcaagccaaaacgcgtggtaaatcattagataaatcaaaatctgatgataagggtcgtaagaaaaaaggtaagcaacgtaaaggtaaaaaccaacgtaataatgataaatcaggtaatagtaagcataagccattttataaagataaaagtgtgaaaaagaaagcacgtcgtaagaaaaaataagcagcaatgaggtgagtatgaatggctaagaagaaatcaccaggtacattagcggaaaatcgtaaggcaagacatgattataatattgaagatacgattgaagcgggaattgtattgcaaggcacagaaataaaatcaattcgccgaggtagtgctaaccttaaagatagttatgcgcaagttaaaaacggtgaaatgtatttgaataatatgcatatagcaccatacgaagaagggaatcgttttaatcacgatcctcttcgttctcgaaaattattattgcacaagcgtgaaatcattaaattgggtgatcaaacacgtgagattggttattcgattgtgccgttaaagctttatttgaagcatggacattgtaaagtattacttggtgttgcacgaggtaagaaaaaatatgataaacgtcaagctttgaaagaaaaagcagtcaaacgagatgttgcgcgcgatatgaaagcccgttattaagcgatttagttgcttaatcgggctatatttgatatagttatatgtgcttttgtaaattacaaaagtatgatttgtttgatttattatttcggggacgttcatggattcgacaggggtcccccgagctcattaagcgtgtcggagggttgtcttcgtcatcaacacacacagtttataataactggcaaatcaaacaataatttcgcagtagctgcctaatcgcactctgcatcgcctaacagcatttcctatgtgctgttaacgcgattcaaccttaataggatatgctaaacactgccgtttgaagtctgtttagaagaaacttaatcaaactagcatcatgttggttgtttatcacttttcatgatgcgaaacctatcgataaactacacacgtagaaagatgtgtatcaggacctttggacgcgggttcaaatcccgccgtctccatatttgtagcctacagcctttgtggttgtgggcttttttattttgtgtttttcaggggataatgcattgcagaatttgttgtgagtattgatatagcagtgtttgtataggtgtttatttgatggaggaaagagtaataagtgattatgaattagtttttgagatataaggggacagtgatgtgtgtcaaataagtgtcaaaaaagttggattctgagttttacattcaacattgttcatgaagaaacttctttatacgcaaaaaattctccatgttatatatgtcaatataaaaatgtgaatcgtctacacttaattggataaatggctactgaaaaagaacttttcatttttgttacgtcactaagtgggtgtagttataaagagatgagccgagttttgatattttcattagaatcaatatgcctattaacacaatcagcaatagttgacgagacggaaataaaagaagtcgtagttaagaaatgcatttcacaacataccattgtagccatttttattgttttggatgataaactctttttggaatttttagtttttataatttgcaactacactacttcttttactaatattaatgtctaagtaatcgataaaaaattttccattgaataaatgagaagttaaaaactttacttaacctttctcattgcattttcctattcacgattttaagaacccaacatactacaaacgaattttaaaaggcgagagtaaagcttacttgtttattatacatatttaaaatccaagagtcagaacagactactcctctttataactataaaaaatagctatgaaaaaatctatcgtcatagattccttcatagctaatcttagtatgtttatttttattttaggatgctatttatcaactcaacatataactcactatttttataaccttctaatatatcattaacttgtctaataggtatttctggtacttctctaatgttttccaattttgttttaaattgtttttttgttatttgctctttatttgtagccaattggaacaagtaagaatctagcatattaatttctttatatgaatacatatatcttaataacactaaatctctagtttttaagttaggcgctagttcttcttgtaattgttctattgattgtttcattaataacaatctcatttctaattcttcattattcattttatcacactctttttatattaatgcttgaccaacttgggaaacccaaaaccctatgcttcttgcagtagaatctttaataccagttcccatcaatgcttgtgaaacttgaccttgtacatttccccatgtagcctcttcttgttttaatgcattattcaatgcgggatttacaaatttatcccatcttttttttatgattttccggcacggggactgatttctttaacaccattaaacacagattttttatttttaatcatagctttatagtatcatgttggctaagctataaataagtcagtttctctaaaaattaaataactgaatgtaagacaatcaacaaaccaaatttatacttcatctaaaccactgtggtcgtcatctttttgcttttctttttctttctctcgttcttgttcttttttgtactcttcttcaaattctttttctttcttttctacttcttctcttgtttccgctctatgagaaaaatcttcggttttaagtttactaaatttgaatgatttagaatcaactgttttatcttctgagtatttatggacatttaaattaatatttccatcacctcttaactcatagataaacatggcttgtgcagttttgccttttttaatttgatcttggttatgttctgtccaatctttatattttttatcacttaaaagataaccatctcttaatttatttactgtatttttatcatcttgagtgatattaatatagtcatgagaaatagaagatggatttaaatctttatcgtcttttttagcagtaatttccattttaaaagcgatatatttctttttctcatctttttcattgatgataaacggttcttttattttagcttcaaatttgtcactaacaatagtatcgcctttaatttttatatccatatttttttgcttttaaattctttaagttcttcatttaattcttcattgtcattttctttctttttgtgactagtgctctctttttttgcactatcttgatgatgtccacaagcacctaagataagtgtacttgctaataatatccccattacttttttcatttaacatgtctcctttatttcgcaaaaatttattttaaaaactctaaatgacttatcattttgagtaattaaacaaagttgatattttgtgagattctaagatgatattaaataattcttgtaataatgatcctatgtattgttgcaataaattaatgaaactataattactaatattatattacttttattgatagaaatatattacttttttaaaaaaacttgtaatatatcgaaagatttaaatgtaaaattttgatttgttaagaaattacgtttgtaaaaataaaaaaatcaacttatttgtatgagataaatatgtattgaagaagacgtgttattaatttggaaaatactggtcaaagatgggagctcttaaaagcgttattgtattttttagtcaatacaaatagattgccgtaataataatcgtacttgatggttaaaaaattacttaaggctataaagcaaaactttttatatgagcagtcgaatataacgtttaaaatgattgtttttggatataaacgattaagtaaaatgctttttcagtttgaaattaatcatataaatttcttatgggagggttgatatcttaatgattaacattatttcagctataggatctattggaacatttattatggctttattttattttgtatcagtttcagttcaactttatcaaatgaaaattagctttctgccagctttaggttttaaccaaattttattagaaagggaggaggatcaacttaatataatgaattcggcaacagaagagcatcatcataaagattatattaaactatataatttaggtggcggtgctgctaaaaaaattgcaatagaggttttattggggaaggataaagtcattcagaaaaaatacgtgcatattttacctagtaaagaagggtacatgttaccaattaataaaaatgtgtacgaagaattagaaagaacgattgagaacaatggtcatgaagctgatttgaatgtacgtatgacttattatcataatgtaagtcgcaaacaacaggaagttatattaaaaggtcaaatcgaccgttttaatacttataataataaagaaatttatgatttgcagtttatctaaaaattgatttaagagggtagttgtttattgcgaaaaatatcattcaattttaatgaaataatggcgtcattactataaaatattactttatgttgtaatgcatttttctataagatagaactaaaaggaggggcaaagatgcaaattagacaaatacatcaacatgactttgctcaagtggaccagttaattagaacggcatttgaaaatagtgaacatggttatggtaatgaatcagagctagtagaccaaattcgtctaagtgatacgtatgacaataccttagaattagtagctgttcttcaaaatgaagttgtagggcacggtttactaagtgaagtttatcttgataacgaggcacaacgggaaattggattagtgttagcacctgtatctgttgatattcatcatcaaaataaaggtattgggaagcgattgattcaagcattagaacgagaagcaatattaaaaggatataattttatcagtgtattaggatggccgacgtattatgccaatctaggatatcaacgcgcaagtatgtacgacatttatccaccatatgatggtataccagacgaagcgtttttaattaaagaattaaaagtgaacagtttagcgggaaaaacaggtaccataaattacacatctgcttttgaaaaaatatgatttcaagctaggattacattaggtagagttcatattaataataaaaaatgtttgcaatcaaatcgtacgttgtcgtttgtaattcttaaaatagcaataaataaaatgtttgttagtaaagtattattgtggataataaaatatcgatacaaattaattgctataatgcaattttagtgtataattccattaacagagattaaatatatctttaaagggtatatagttaatataaaatgactttttaaaaagagggaataaaatgaatatgaagaaaaaagaaaaacacgcaattcggaaaaaatcgattggcgtggcttcagtgcttgtaggtacgttaatcggttttggactactcagcagtaaagaagcagatgcaagtgaaaatagtgttacgcaatctgatagcgcaagtaacgaaagcaaaagtaatgattcaagtagcgttagtgctgcacctaaaacagacgacacaaacgtgagtgatactaaaacatcgtcaaacactaataatggcgaaacgagtgtggcgcaaaatccagcacaacaggaaacgacacaatcatcatcaacaaatgcaactacggaagaaacgccggtaactggtgaagctactactacgacaacgaatcaagctaatacaccggcaacaactcaatcaagcaatacaaatgcggaggaattagtgaatcaaacaagtaatgaaacgacttctaatgatactaatacagtatcatctgtaaattcacctcaaaattctacaaatgcggaaaatgtttcaacaacgcaagatacttcaactgaagcaacaccttcaaacaatgaatcagctccacagagtacagatgcaagtaataaagatgtagttaatcaagcggttaatacaagtgcgcctagaatgagagcatttagtttagcggcagtagctgcagatgcaccggcagctggcacagatattacgaatcagttgacgaatgtgacagttggtattgactctggtacgactgtgtatccgcaccaagcaggttatgtcaaactgaattatggtttttcagtgcctaattctgctgttaaaggtgacacattcaaaataactgtacctaaagaattaaacttaaatggtgtaacttcaactgctaaagtgccaccaattatggctggagatcaagtattggcaaatggtgtaatcgatagtgatggtaatgttatttatacatttacagactatgtaaatactaaagatgatgtaaaagcaactttgaccatgcccgcttatattaaccctgaaaatgttaaaaagacaggtaatgtgacattggctactggcataggtagtacaacagcaaacaaaacagtattagtagattatgaaaaatatggtaagttttataacttatctattaaaggtacaattgaccaaatcgataaaacaaataatacgtatcgtcagacaatttatgtcaatccaagtggagataacgttattgcgccggttttaacaggtaatttaaaaccaaatacggatagtaatgcattaatagatcagcaaaatacaagtattaaagtatataaagtagataatgcagctgatttatctgaaagttactttgtgaatccagaaaactttgaggatgtcactaatagtgtgaatattacattcccaaatccaaatcaatataaagtagagtttaatacgcctgatgatcaaattacaacaccgtatatagtagttgttaatggtcatattgatccgaatagcaaaggtgatttagctttacgttcaactttatatgggtataactcgaatataatttggcgctctatgtcatgggacaacgaagtagcatttaataacggatcaggttctggtgacggtatcgataaaccagttgttcctgaacaacctgatgagcctggtgaaattgaaccaattccagaggattcagattctgacccaggttcagattctggcagcgattctaattcagatagcggttcagattcgggtagtgattctacatcagatagtggttcagattcagcgagtgattcagattcagcaagtgattcagactcagcgagtgattcagattcagcaagcgattccgactcagcgagcgattccgactcagacaatgactcggattcagatagcgattctgactcagacagtgactcagattccgacagtgactcagattcagatagcgattctgactcagacagtgactcagattcagatagcgattcagattcagatagcgattcagattccgacagtgattccgactcagacagcgattctgactccgacagtgattccgactcagacagcgattcagattccgacagtgattccgactcagatagcgattccgactcagatagcgactcagattcagacagcgattcagattcagacagcgattcagattcagatagcgattcagattccgacagtgactcagattccgacagtgactcggattcagatagcgattcagattccgacagtgactcagattccgacagtgactcagactcagacagtgattcggattcagcgagtgattcggattcagatagtgattccgactccgacagtgactcggattcagatagcgactcagactcggatagcgactcggattcagatagcgattcggactcagatagcgattcagaatcagacagcgattcagaatcagacagcgattcagattcagacagcgactcagacagtgactcagattcagatagtgactcggattcagcgagtgattcagactcaggtagtgactccgattcatcaagtgattccgactcagaaagtgattcaaatagcgattccgagtcaggttctaacaataatgtagttccgcctaattcacctaaaaatggtactaatgcttctaataaaaatgaggctaaagatagtaaagaaccattaccagatacaggttctgaagatgaagcaaatacgtcactaatttggggattattagcatcaataggttcattactacttttcagaagaaaaaaagaaaataaagataagaaataagtaataatgatattaaattaatcatatgattcatgaagaagccaccttaaaaggtggcttttttacttggattttccaaatatattgtttgaatataattaataattaattcatcaacagttaattattttaaaaaggtagatgttatataatttggcttggcgaaaaaatagggtgtaaggtaggttgttaattagggaaaattaaggagaaaatacagttgaaaaataaattgctagttttatcattgggagcattatgtgtatcacaaatttgggaaagtaatcgtgcgagtgcagtggtttctggggagaagaatccatatgtatctgagtcgttgaaactgactaataataaaaataaatctagaacagtagaagagtataagaaaagcttggatgatttaatatggtcctttccaaacttagataatgaaagatttgataatcctgaatataaagaagctatgaaaaaatatcaacagagatttatggctgaagatgaggctttgaagaaattttttagtgaagagaaaaaaataaaaaatggaaatactgataatttagattatctaggattatctcatgaaagatatgaaagtgtatttaatactttgaaaaaacaaagtgaggagttcttaaaagaaattgaagatataaaaaaagataaccctgaattgaaagactttaatgaagaggagcaattaaagtgcgacttagaattaaacaaattagaaaatcagatattaatgttaggtaaaacattttatcaaaactatagagatgatgttgaaagtttatatagtaagttagatttaattatgggatataaagatgaagaaagagcaaataaaaaagcagttaacaaaaggatgttagaaaataaaaaagaagacttagaaaccataattgatgaattttttagtgatatagataaaacaagacctaataatattcctgttttagaagatgaaaaacaagaagagaaaaatcataaaaatatggctcaattaaaatctgacactgaagcagcaaaaagtgatgaatcaaaaagaagcaagagaagtaaaagaagtttaaatactcaaaatcacaaacctgcatctcaagaagtttctgaacaacaaaaagctgaatatgataaaagagcagaagaaagaaaagcgagatttttggataatcaaaaaattaagaaaacacctgtagtgtcattagaatatgattttgagcataaacaacgtattgacaacgaaaacgacaagaaacttgtggtttctgcaccaacaaagaaaccaacatcaccgactacatatactgaaacaacgacacaggtaccaatgcctacagttgagcgtcaaactcagcaacaaattatttataatgcaccaaaacaattggctggattaaatggtgaaagtcatgatttcacaacaacgcatcaatcaccaacaacttcaaatcacacgcataataatgttgttgaatttgaagaaacgtctgctttacctggtagaaaatcaggatcactggttggtataagtcaaattgattcttctcatctaactgaacgtgagaagcgtgtaattaagcgtgaacacgttagagaagctcaaaagttagttgataattataaagatacacatagttataaagaccgaataaatgcacaacaaaaagtaaatactttaagtgaaggtcatcaaaaacgttttaataaacaaatcaataaagtatataatggcaaataattaatgcatggctgcaaagcaaataatgagtttgtcgtaaaaataacaacattttaaactagcaataaataatatcaaagtcatcatttcaatgatgcaatctagtatagtccacattctaaacaggtgtggactattacttttttcactttatattacgaaaaaattattatgcttaactatcaatatcaataattaattttaagctgaaaaacaataaaaatgttaagacaacgtttacttcaagttaattattatactgaaaattctggtatataatgctgttagtgaatataacagggaaattatattggttataatattgagtctatataaaggagaaataacagatgaaaaagaaattattagttttaactatgagcacgctatttgctacacaaattatgaattcaaatcacgctaaagcatcagtgacagagagtgttgacaaaaaatttgtagttccagaatcaggaattaataaaattattccagcttacgatgaatttaagaattcgccaaaagtaaatgttagtaatttaactgacaataaaaactttgtagcttctgaagataaattgaataagattgcagattcatcggcagctagtaaaattgtagataaaaactttgtcgtaccagaatcaaagttaggaaacattgtgccagagtacaaagaaatcaataatcgcgtgaatgtagcaacaaacaatccagcttcacaacaagttgataagcattttgttgctaaaggcccagaagtaaatagatttattacgcaaaacaaagtaaaccaccacttcattactacgcaaacccactacaagaaagttattacttcatacaaatcaacacatgtacataaacatgtaaatcatgcaaaggattctattaataaacactttattgttaaaccatcagaatcgcctagatatacacatccatctcaatctttaattatcaagcatcattttgcagttcctggatatcacgcgcataaatttgttacaccagggcatgctagcattaaaattaatcacttttgtgttgtgccacaaataaatagtttcaaggtaattccaccatatggtcacaattcacatcgtatgcatgtaccaagtttccaaaataacacaacagcaacacatcaaaatgctaaagtaaataaagcatatgactataaatacttctattcttataaagtagttaaaggtgtgaagaaatatttctcattttcacaatcaaatggttataaaattgggaaaccatcattaaatatcaaaaatgtaaattatcaatatgctgttccaagttatagccctacacactacgttcctgaatttaagggtagcttaccagcaccacgagtataaaaattggcactaagtttacgagatatgataaatacctattattttaaatatagtctacaatctatgtggttgtaggctgtattttttgcagtttatcaataaacacccatcaacaaattataccgtttttctactttgaaagttggaagtaacataatcttaaataaatatattattaattaagataaatataatactcaagattattgttaatagtttgttcatcgcaagttaattattgtttctaaaatattggtatataattttcaatggcgaagaaaacagggtgaaaaagtcggtttttatatcaaagcaaataagggagcataaacaaatgaaaaggaaagtattagtactaacaatgggtgtaatttgtgcaactcaattatggcattctaatcacgcaaacgcattagtaacagagagtggcgcaaatgatactaagcaatttactgaaattgtatcggaagagaaagttataacagttgaacatgctcaaattaatatttttcaatctaatagcaattcaaacttgatggagttcaacatattaacaatgggcggtaaatcaggagctatggttggttatagtgaaattgactcatcacatttcacagaccgtgacaaacgcgttattagacgtgatcatgttaaagaagcacaaagcttagtagagaactataaagatacacaaagtgctgatgctaggatgaaagccaaacaaaaagttaacacattaagcaaaccgcatcaaaactatttcaataaacaaattgataaggtttataatggattacaacgctaatccaaagtaaattataagttatacatctcgtttttaaatgacaatttatccccgtaaatattataaataatcttttcaaattccacatagatatagagacactaataaacctctttgtctcgatatgatagtctgcaacgattcatgttgtaggctttttaattttacaaataaggctaaatatataagttctggcacctaaaatatagaaaatacataaaagtaagtatagttattttattataattattaaatttttattaattaattgtaaaaatgtagaattataattaattaacgtttaatattaaaattaactaaaaagaaagaggtgttagttatgacagaatacttattaagtgctggcatatgtatggcaatcgtttcaatattacttatagggatggctatcagtaatgtttcgaaagggcaatacgcaaagaggtttttctatttcgctactagttgtttagtgttaactttagttgtagtttcaagtctaagtagctcagcaaatgcatcacaaacagataatggcgtaaatagaagtggttctgaagatccaacagtatatagtgcaacttcaactaaaaaattacataaagaacctgcgacattaattaaagcgattgatggtgatacggttaaattaatgtacaaaggtcaaccaatgacattcagactattattggttgatacacctgaaacaaagcatcctaaaaaaggtgtagagaaatatggtcctgaagcaagtgcatttacgaaaaaaatggtagaaaatgcaaagaaaattgaagtcgagtttgacaaaggtcaaagaactgataaatatggacgtggcttagcgtatatttatgctgatggaaaaatggtaaacgaagctttagttcgtcaaggcttggctaaagttgcttatgtttataaacctaacaatacacatgaacaacttttaagaaaaagtgaagcacaagcaaaaaaagagaaattaaatatttggagcgaagacaacgctgattcaggtcaataatgctcattgtaaaagtgtcactgctgctagtggcacttttataatttttagatcacgatatgatttattatcaattcagaattaaaaaagtaaatagtatcaaaagtaagtgtatttaatattagaaaataaaaattttaaatttagtattaaaatggaatgttactatatagttcaatgtgtattatcacagaaaataaaataatgctttacttctatatttaaaagtgtataatgaaagttaagtaataaagagcgtgaagaaaaatagtcaagtccagactcctgtgtaaaatgctatacaatgtttttaccatttctacttatcaaaattgatgtattttcttgaagaataaatccattcatcatgtaggtccataagaacggctccaattaagcgattggctgatgtttgattggggaagatgcgaataatcttttctcttctgcgtacttcttgattcagtcgttcaattagattggtactctttagtcgattgtgggaatttccttgtacggtatattgaaaggcgtcttcgaatccatcatccaatgatgcgcaagcttttgaatattttggttgatcgatataatcatgaatcaatcgatttttagcctcacgcgctaagttaatatctgtgaacttaaaaattcctttaacagcttctctgaaagattttgaattttttttaggaatggtggtaaagatatttcttaggaagtgaacttggcatctttgccaacttacgttggtgaaggattttctaatggcagagactaatcctttgtgcgcatcagaaataacgagttccgtaccttgtaaaccgcgttcttttaggtattcaaaaaatgttgtccaggtctcttcgctttcgccactttgaatcatgaagccgataatttcacggtcgccatctttggttattccaatcgctatatgacagctttttgagagtactcgattttcttctcgtacttttatatagagtacatcggtcattaagtaaggataatttttttctgataataaacgattctgccactcgttaaccataggttctagctgttctgttaagctagaaacgaaggacttagagacggatttaccacaaagttcttccacaatttttgatactttacgagttgaaacgcctgatacatacatttccaacattgaagccatgagggctttttcgtttcgttgataacgttcaaacactgtgggtgaaaaatggccatcacgtgttctgggtacttttaattctagcgtgcctacacgtgtcgtaaagctgcgctcataatagccatttcgttgactttgtcggttttctgttcgttcatattcttttgcttgaatatattctgttcgttgattttccattagttgattaaataccgttgttaaaatatttttagaaacgtcatcctttacagaatattcaataatgctttgaatctcttcgcttttcagtgtaaaatgtacttgggtcatgtaaaagtcctcctgggtatgtttttgtcgttaaaaacattgtaccgtaaaaggactgttatatggcctttttacttttacacaattatacggactttatcagaaaaatgtgagttatttatatagaatattctccttttcatttatgaatttgttacaaaatatttagtgcaaaagcacgacggaggtattcaatatgaataacggtacagttaaatggtttaatgcagaaaaaggttttggtttcatcgaaagagaagatggtagcgacgtattcgtacacttctcagcaatcgctgaagatggatacaaatcattagaagaaggccaaaaagttgaattcgacatcgttgaaggcgaccgtggcgagcaagctgcaaacgtagttaaaatgtaattttaacttattcaaacagtccttactatagggctgtttttttatgctttaaatcgataacagttggtgtggtaaaagcactagccgttatttttttgtccaataaatttagttggagatttaacaatatataatggttctaaaataaatcgaactgatggaaaagttttttacttttcatctgtccgacttttgattttgaatataaaaaagcgccaatacagaactttaataatgacgagaattaaagtctgtatatggcgataacaagaagtaatgttaaacactcaaaatgtttaacaataataggataccacatcgcataatatcttactacttaattaataatttaactaatcaactttttgttaattttttattaagactgattaattattgagaatatttattgtttttaaaatctcataataattcagtaatcttgttttcatttaaaaggcgaaacattaaaataattaaataaaaatattgcgtttaatttacagcgtcaaatatacttatttctaatgctttggggtctactgaaacaagtaaagaatgatcgatgttactaatattgccattctccaaatttatttctgtgagtatttggaagctaccattaggcaacggtttaacaatagacaattgcttttccgcttgttgtattaaaaaaggttttgtagattgattattaatatgccattcactcatgtatgtttttcactcctgctttaaaatagggttagaaagtttatagttgagacattcatgttcaaccaaaattttgttcgaattcaataaatgtcttgtttaaaatagaaatattgtaaatgttatcgtccaaaacttcaccagttaagtatttgttttgaattaaaatttggcagttagttaagaagtcttgataatcacgatcgcaaaaatagttttcacgtgcatctttagcatcgccaaaaaagttagcgactgtttctgtttctcctttattcgaacgttcaatatataatttgtaaaatttagctattgtatacttttgttctttagttagttcattcaaaatattgggcctcctgaaatatcatttgtaatctatacccaatttattgcaaaacacaaactaatttaactatttgatgaaactgtgttaataagctttaacaagccttagtttgtatggatctataaaattatctttaattgcatagggtgaaataatatgtagtccataacttttaactgatttttcacttacaccaaatttataagcttggtagataattttagtacaatacgtaaattttttgctgttcaaatttaatgtaactagataacgatgatttgtattctcatagtttttcttaacccattcagccgcttttttacctgcaccaggatagctgcaacgataaactttcatccaatcatttttgccacttgcataattatatttaaaagattcgaaggattgtgtagttggtttgtcgccaggcccctcaatttgtaaaatcgttttatcatcaatcgcgatactacaatgaccaaaaaatccccacatgacagggccttttgtaacaataatatcaccaggttgtaattggaatttgtcatcttgaatttctgaatacttattatctgcaattgtttttggtgagtttattggggatacgacaacgaataatataagtaaaattatcgttcgtttaatatagttcacttaaaagctccttgttgaagaaatatatgtaaatagtcttaaattagaattgtaatctttaataagcttgtaagactaaaacatatcttaaatattaaagtatgagagtgtgaaatgtctattaagaataaaaaacagtctgaaacatcattgagacgtttcagactggatataaaatgaatttcatttatagcacaccaaatataaatgtgtatattaatatagcgaatccaaaaatatagagaatgacagtgaaacttaaataggactcttttttagattctttgctagtttttttcattaatacgagtataaacgtagcggcaactaagaaaattaatgctagccaaaacagaattgcaaaatgtaaagacatgtgaaaccctccttatataccgtaattattaacctataaaactataaaaaataggataaatgtaatagagaacgagtacgatatttataaaaaataatatttcacttaaccagtttttagttatcattgcaatggtaaaggatacgatgagtatcacaccacaaatgataataccaggcaggagccaacataaatcatctaaatctttattatatgtgattaaaatattaaagataacaaaagtggtagtaataactatattgatagcatttaacaaaatgttattcatgactgacacctactagtataaaaatagcttcttaataaatatgataacactatttttcaataggtaaataaaaagtatagttatttttaaaatattatttgcagaatgctaaagtttattaattcaaacaagtgagcatatataggggtgtattgtattaatatgaaaagaatatttacatactaaaaactcttaaagttgtataattcgttaatatttttagaatcagatatcaaaaaaatgtgcaaaatcacttttgcacatttacaaatactagttttctgataagattaataataacactttaaatagcgcttaataaatgaagggggcaagtcttatgacgttttacaatttcatcatgggttttcaaaatgataacacaccatttggtatattggccgaacacgttagtgaagataaagcattccctcgattagaagaaagacaccaagtaattagagcatatgtgatgtctaattacacagatcatcaattaattgaaactacaaatagagctattagcttatatatggcaaattaatttgagtagtaccaattatgatgtattagtgcatcccaaatatcttttgttttaaagtttatttcatcatttcttatcgaaaatggtgtaataatgtctttatctaaccaagtgttgataagttcatttggtacaccatctaacaacatttcacttttactaattataaaacattcccagtcaagtgaaacattttgtggattcacataattacattgattatgattatccataaacactcactcctttaaaattctgtactcttcattgcgttttaccccgtcacattatcttttaaactaaaatcatcattacttatgaaaaaaatgtacatcaaaagcaaaggttttcgctaccgaaaaagtttaaataatggtttaatatatttggtactcattttaataaaaagagaatacattttgagctatcaatactttttattgaagaggtgttattgttggctaaaacgttatatataatgcgccacggacaaactttgtttaattttaagggactaattcagggatttggagattcgccgctaacagaacttggaattgctcaagctcaaaaggcacgtagttattatgaaactaaggggataaacttcgatttatatgcatcatcaacgcaagaacgcgcaagtgacacacttgaaaatgttgcacctaaccaatcgtatcaacgttttaagggactgaaggaatggcattttggaatatttgaaggtgagtcagtctatctatttgataatctatacaagcctgaggacttattcggagatcgaattgttcctttcaaaggagaggcaaggcaacaagttgaagaacgcattgtgaaaactttacatgacattatgtctcaaacaaagaataatgcattagtcgtgagtcatggaacaataatgggagtatttttaagatattgccttaaactagatgaagcattaaagcataatatcggtaattgtaatatcctgaaatttgaatatgacaatggaacatttaaatttgttgagttaattgatccaaatttataataaataaagcgttatacatagacacaagtatgtcttttgtataacgcttttaaaatacaactacataacgctttagaataataattgaataagtttttgtaatatcatcagagcaacaataataattattatgcttgatattttattgattattgttaataattttccggttttatcaattgatccaaccatttttcctaaaattgcgagtaaaaagaaccataaccatgaaacgctaatacaagcgattgtaaacgcaattttattgctgccactatataatgcagcactactaccaattactccaattgtatctaaaatagcatgtggattgagtaatgaaactgataaagcaaaacttacttgtttcattggagacataatttgagtttctccatctgttgagggtttatcatgccaaatggtccaagccatatacatcaagaaaattaaaccaactatataaataattgcttgaagtacaggtaaagacataataatgatagatactcctaccactgcaataataataagtaagctgtctgacaacccggctgtaattattgcaggcaatacatatctatattttggttgattagctccttggttaaaaataaatacattttgtgcacctaaaggtaaaattagaccaatcgctaagataaatccatgaataattgcggttaccattaagttttgacacccctaaaacatagaatattctgaaaaaacttattgttatcatatcaaataaaaaacaactactcaatagtagagtagttgtatgaaaaatagaacctatatgatttgaatttatgagaaatgtagaatatataaaactgtattacttattaatcaaatcataaaaaagccaatgttcatcgaaataggtatttccgattttaattgcatttttctcaaaaccaagaatgtcgaatcctagtgcactatagaaaactttagcacctatgttgtttgacacaattgatgtaagtaaagattcgtaattgttctgccgtgcataattaataatgaaattaatgagctcgctattaatcgatttatcgttattagtaacaaagttgtatttaattaatgatttatgttcttttccaacgtatcgaatttgttctaaggcagctgttgcgataagtgtttcgttttcataacagccaaatacaatacatttcggtgaaccttgatttaaaatgtcatgtattaaggtgtcagtcattgtttgactataatgtgaatcttgagtgaattcttcattgactgtcgaaacaagtctcttatactcattaaaatcattattcgttaatgttttaatttcaatcattactgacctccttaatcattattaagaaagattttgtactaaaaaaatttcttaattacatattaaaatgtttattaaaattttgcaatcactgatttatatgcacattcttgtaaatggattatcaatttaattatatttatttttaagttcaggaaattatggaattggttattggtcgacactggacttttatttgtagacggtatgcgaagaagtcaagccagtattggaaccggtcacatttatgatgactaaggtacaatcattttcagttaaatattgccagaaatttcaatcacgaatagaaaaaataaccaaccaaaaatttttggttggcaaatttgaattttatgtgaattttattaataacgttgaataatctctttaagttaatgctaatctacaacatttacatttaaatcgacattaatatttccttgagtcgcttttgaatatggacaaaattcatgagccatttgtaaatatttttcagcttcttcttgagatataacatttttaattgtcgcatcaattgaaacacttaatttaggactttctgagtctgaatcatcttctagtctcactgttagtgttacttctggatgagcatcacgcactttgttttgctttaaaattaggtcgaaagcaccgttgaagcaagatgcataacctgctgcaaataattgttcggggttagtagctttaccatctgcttgagcaggcggaacgatatcaatatctaatgctcgatcatcagtataaacatgtcctttacgtccgccaacattcgtcgctttagtttcataatgtattgccatacttataacctcctaatttaaaatacatttatgctttacccattcgaaaataccttaatcattttcatttatagcattgtttgattgaaggataaaaagttgttgtttacaataaaaataatgagtatctgaaatgagggattcactatgacacatgtggaagtagtagcgactatcgcgccacaattatctatcgaagaaactttaattcaaaaaattaatcatcgtattgatgcaatagacgtattagaattacgaattgatcaaattgaaaatgtcacagttgatcaagtggcagaaatgattacaaagctgaaggttatgcaagattcattcaaattattagttacgtatcgtacaaagttacaaggtggctatgggcaatttacaaatgactcgtatcttaatttaatatcagacttagcaaatatcaatggcatagatatgattgatatagaatggcaagcagatattgacattgaaaaacatcaacgaatcattacacatttgcaacagtataataaagaggtggttatatcacatcataatttcgaaagtacgcctccattagatgaattgcaatttatattttttaaaatgcaaaaattcaacccagaatacgttaaattagcagtaatgccacataataaaaatgatgtgttaaatttattgcaggcaatgtctacattttcagatactatggactgcaaagttgttggtatttcaatgtctaaacttggactaataagtagaacggctcaaggcgtttttggtggtgcgttgacttatggttgtatcggagtaccacaagctccaggacagattgatgttactgatttaaaagcacaagtgactttatactaataaaatgaattaggttgcttttgtgtaagtgctgtcttataattgagaagtattatcattgttcgtggaggagcgattttagatggaattacaacaagcaatagctaatagaagaagtgtgaaaaaatttaaaagagatatgcacatagatgacgcattgctatatcaagcaattgagaaagctgctgatgctccaaatcacggaatgagggaaccatggagagttgtgcatgttccgaaagacagattaggagatatgagtaaggatatttctaaatttgcatttcctaatgaattagataagcaacaatgtcattatgatgcagttacgaaactaggtggcatgttattgcttattttaaaaacagatccaagacaacgtcaaaatgatgaaaactactttgcatttggtgcatatgcacaaaatcttatgttgttactttatgaagcgggaataggtacatgttggaaatcgccattatatatctatgatcctaaagtaagaaaaacacttggtataaagaaagatgaagttcttgctggattcttatatttaacggatttagaaggagatatgcctaaagcaccacgtaaaaatagaaacttaattacattatattaatatgtataattatagaaacattaataaaagctgagtcatgaattgatggacatctatcgagttagagatttaatctaacttactagagtcggtacaataacagtctcagctttttattgtgcagtatatacacatttttattttagtatttatttaaaagtttctgctaaaaatgattcaacttgttcaggtgacttagcatttgctgaatgaaggtgtgcaattttatcgccgtttttaaatactagcaagctagggatacccataacttcattttcaacaactacatcttctaattcatcacgattaacagtataccattggtaatcattatattgttctacgattgggtcaatccataaatccatagcacgacagtctgggcaccatcctgcctcaaatttaacaattacaggtgtatcgctattaattacagatttaaatgattcattacttttgattgattgcattgtaacaactcctctagatagtttaataatttttattatagctaaatttatatcataataaaaaattttagcttcaaaatgaaagccttttgctttggaaaatgatatatttattttaaatacataaaggaggttgcagtcgtatgattaaattttaccaatataagaattgtacaacttgtaaaaaggcagcaaagtttttagatgaatatggcgtaagttatgaaccaattgatatcgttcaacatacacctacaataaatgaatttaaaacaataattgcaaatacaggcgtagaaattaataaattgtttaatacacacggcgcgaaatatcgtgagcttgatttgaaaaataaattacaaactttatcagatgatgaaaagttagagttgttatcatctgatggtatgttagtaaagcgtcctctagcagtaatgggcgataagataacattaggatttaaagaagatcaatataaagagacttggttagcgtaagtgaaatgtaagcgtttactaaatatctcgatatttagattcattacatgtaaaatgaaataagctatacaattgttaatttttataaatatagttgaatagcatctagccttatggcatcattaatgatgtaaagattaattaggaggggattctcttggcagtaccaaatgaattgaaatattcaaaagagcatgaatgggttaaagttgaaggtaatgtagcaataattggaatcacagaatacgcacaaagcgagttaggtgatattgttttcgttgaattaccagaaacagatgatgaaattaatgaaggggatacgtttggtagcgtagaatcagttaaaactgtatcagaattatatgcaccaatctctggtaaagtagttgaagtcaacgaagaactagaagatagtcccgaatttgtaaatgaatctccatacgaaaaagcatggatggtaaaagtagaaattagtgatgaaagtcagattgaagctttattaacagctgaaaaatattcagaaatgattggtgaataatcaccgtgtaactccttaatctaagattgaggagtttatttttagtctgagaaaataaatgatatgaaagaaaaattattaggtactattatttggagtattgctacattttattattcaagaatgatggaaataatgaatttagctattttaaaaataaaaattgggggaagttaatatgctaaacattcaagacgttagtcatctttctaaaaaggagcaaaaagcatataaccgtttcgtagaatctgtagaaaacggtaatttaccagtactaccatgtattgaaatggatctaaaagagatgcaagaagaaacattaaaccagagtaagattggtggaatgccatttttaaaatcttttaaagatataccattagatgaaaataatgtaccaatggtattgctagcacagattaatttggatgatcttccagaacaacaagaattatttcctgtaaaagaagggatattgcagttttggattagttcagaagatcaaatgtatggaatgtctgaaaatttaaagggaaacaatataaactcaaggcttgtttatataaaagagccaattacagatttatcactcgaaaatattcaagcgcatttgaagtcattagatgctgataatgaggatatcccgttcagtggagcattttctatagaatttagattgtcgaaacaaactattacatgtactgattataagtacgatgaggacgtgcttgcattgtggaataaagtcaatccatccttcgcgctaaaatcaatgtttggtggttatgatgaattgatggaacctgtgtgtaacacatttactgctaaggaaccatttaatcaacttggtggttatccatattttgaccaaatagatccaagaacgaacgatcaagaactgaaaatgtatgatagagtcttactgcaaattgattctacaagagatggtaattcttcgattatatggggtgatttaggtattgccaatatcttagtgaaatctactgaccttgaggctatgaagtttgatgattacatgtattcatgggattgcagctaagagaatcataaaaatatattactttaataagtgtagtatctatagatcaatctagggagtgggacataaatgatattttcgcaaaatttatttcgtcgtcccaccccaacttgcattgtctgtagaaattgggaatccaatttctctttgttggggcccatccccaacttgcattgcctgtagaatttcttttcgaaattctctgtgttggggcccctgactagaattgaaaaaagcttgttacaagcgcattttcgttcagtcaactactgccaatataacttcgtagagcatagaacattgatttatgtcccagcctgttttcataagccacagctaatgtgtatttaaaaataggaatacatgagtaaaactcatgcataagaaatactaatttctaaagaaaaagtatttctttatgttggggccccgccaacttgcacattattgtaagctgacttaccatcagcttctgtgttggggccccgctataattgaaaagtttgttataggtgtattttcttttggttaactattgttaatataacattgtagattttaggatgttgatttttgacttagcctttgtctgcttatgttaaatgttccagctagtcaaacattgagtttgtaattattatattaagctagtttaaattttttgtgatttatgttttattcataccaattttgtgaaatgatacagtgacagatgtttattgattttaaagggtgatgatgatggctattgtaaataaagtgataattgttgaaggaaaatctgataaaaaaagggtgcaacaggttattgcagaaccagtcaatattatttgtactcatggaacaatgagtatagataagcttgatgatatgatagaatcactgtatgataaacaagtttttgtattagccgattctgatgacgaaggagatcgaattagaaattggtttaaacgttatttgagtgaaagtgaacatatatttattgataaaacttactgtcaagttgcgaattgccccaaacaatatttggcgcatgtactttcaaaacatggctttacttgtaagaaagaaacacctcttttaccgaatataaataatgaaaggttagttttagtaaatgaataattcattagacatcaaagatgtaactacattttatgaggaagacaaacatttaatctttggttatacaccaacgtgtggtacttgtaaggtttcagaaagaatgttagacattgctaatgaaatattgcagttaccattattgaaaatagatttaaacttttatcctcagttttgtaaagatatgcaaatcatgtctacgccgattttattgttgatgaataaagataaagaagtaaaacgaatttatgcatttaaatcggtgactgatttgttagaaaatttaaaatagttattgacgaaattttactaaggtgttaggattaatacaaattaaatgatgcgtaaactcttatcgagagtggtggagggatgtgccctacgaagcccggcaaccgtcttatatagaaatggtgccaattcacataaagttttaacttttgaagatgagagaaacaatactactattgctttctcaatttttctatcgatattgagaaagcattttttattttattaagcaacacagggaggaatcaacgtgattgaattaaaagaagttgttaaagaatatcggactaaaaataaagaagtccttgctgtagatcacgttaatttatcgattcgagcaggatcgatttatggcgtcattggtttttctggagcaggaaaaagtactttgattcgaatgtttaatcatttagaagcgcctacatcaggtgaagttattatagatggagaccatataggtcaattgtccaaaaatggattaagagcaaaaagacaaaaagtaagtatgatcttccaacattttaatttgttatggtcaaggactgtgttaaaaaatattatgtttccgcttgaaattgcaggtgtccctagaaggagagctaagcaaaaagcattagaacttgtcgaactcgtcggtttaaaaggtagagaaaaggcttatccatcagagttatcaggtggacaaaagcaacgtgttgggattgcacgagcgttagctaatgatccaacggtcttgctttgtgatgaggcaacaagtgcacttgatccgcaaacaacagatgaaattttagatctactactaaaaattagagaacaacaaaatttaacaattgtactaattacgcatgaaatgcatgtcattcgtcgtatttgtgatgaagttgcagttatggaaagtggtaaagtgatagaacaaggaccggtgacacaggtttttgaaaatccgcaacacactgtgacaaaacgatttgtgaaagacgatttaaatgatgatttcgaaacatctttaacagaattagagccattagaaaaagatgcatatatcgttagattagttttcgctggttcaacaacaaccgagcctattgtatcgagtctatcaactgcctatgatattaaaattaatattttagaagcaaatattaaaaatacaaaaaatggaacagtcggctttttagttctgcatattccatatatttcaagtgtagatttcggaaaattcgaaaaagagttaattgagcgacaagttaaaatggaggtgttaagacatgggtaaatcatttagtgaaattataaatgaaatgattacaatgcctaatattcagtggccagaagtttggactgcaatagtcgaaacactatacatgacagtcgtctcaactatatttgcatttatacttggtcttattttaggtgtgttattattcttgtctgctaaaggtaagtctatcggtgcaaggttattttattctatcgtttctttcattgttaacttatttagagcgataccatttattattttaattttattattaattccatttacaagtttgatacttggaacgataagtggtccgacaggtgcgttaccagccttgatcattggcgcagcaccgttttatgcaaggctcgtagaaattgcttttaaagaaattgataaaggtgtcatcgaagcggcttggtcaatgggcgctaatacttggacagtaattcgtaaagtccttttacctgaagctatgccagcgctagtgtctggcattacagttacagcaatcgctttagttggttcaacagcagttgcaggtgtaattggtgccggtggtttaggaaatttagcatacttaacaggtttcactcgaaatcaaaatgatgtcattttagtatcaacagtttttattttaattattgtatttataatccaattcattggggattggcttacaaataaacttgataaacgataaattgggggtttcattttatgaaaaaattatttggtcttattttagtattaacatttgcagttgtattagcagcttgcggtaatggaaacaaaagtggcagtgacgacaagaaaataacagtaggtgcttcaccagcaccacatgctgaaattttagaaaaagcaaaaccattattagagaaaaaaggttatgaactagatattaaaacaattaacgattacactacacctaataaattactagacaaaggtgaaattgacgcaaactatttccaacatacaccatatttaaacacagagaaaaaggataaaggttacaaaatcgtaagtgccggtgatgttcacttagaacctatggctgtatactctaaaaagtataaaagtttaaaagaattaccaaaaggtgcaacagtctatgtgtctaataatccagctgaacaaggacgtttcttaaaattcttcgttgatgcaggtttaattaaaatcaaaaaaggcgtaaaaattgaagatgctaagtttagtgatattacagagaataaaaaagatattaagtttaataataaacaatcagcagaattcttacctaaaatttatcaaaatgaagacgctgatgctgttatcattaattcgaactttgcaatcgaacaaaaactaaatcctaaaaaagattctattgctgtagaaagtgcgaaagataatccttatgcaaacttaattgctgttaaagaaggacatcaagatgataagaaaatcaaagcattaattgaagtattacaatctaaagatattcaagacttcattaatgaaaaatacaatggtgcagttattcctgctaaataatatcaattaaatagaaataccctttaatgacaacgattaaggggtttatttttgtggtattgaaaataaaaaagggcacaaaaggggcagtatatgcaaattatcgaattttaaacaaaaaaatacgctcagatttgagcgcattatccaagttttacttgttcaagtttgttcatcatatccttatccatctgttcagtaacgtgagaataaatggaaagtgttgtacggtggtcggaatggcctacacgatccataatagctttaagtgacacgccttgttgagagagtaatgatatgtggctatgtcttaatatatgtgaagaaacttctttatcaataccaacatctttagctgcttccctaaggattttattgaatctttcagtctgcattgggttgcctttatgattagtaaacacaaaatttctatttagatatccatcattccattttgaatcctttttgttctccagtattgctttctttaatatctcgcaacttctgctactcaatccaattgttctataactagactctgttttagtggtatcttttacaccgaatccaccagattcatcgtgaaaccaatggattgttccgttaatatttaaactcttattatcaaagtctatatcttcattttgaatggctaacatttcaccaatacgcataccatttaaggcttggaattctgtcatgagtgcaacgaataaataaaaccgcttatggatacctgagtgcatcttctgagccttcatattaatatctttgatgatagattgtatttcatttaattcgaggtacttattacgtttagctttcacttcatcataagacttaattcttttatttaacgttatatcttttaaaaattctaaatcttgcagtttatagatgcgtctagtgtattcaaatacatttttgaatatgcttaacgcatctttgttaacttgatatacataacctttactatccatttcatcgaaaacttgttgcgcatatgaaagtgttattttattgattaaaatatcttcatctacaaatttcttcaaagtgtttagcttactcaatttagttttaatagttgttctttttgacccagacgttttgatataattctgaaaccactcatcacatgcgacatgaaaagttaatgattttaacgttgtcggtgtattatcattcagttttgcctctatacgctcatttaagcgtctctgagcctctttctgcgactgcttaccattcttattgagaaccacgctaacacgtcgccatttatttgtgagagggtctttgtacttctcataatagcgatatttagtttcaccatgtttattagtaaatttctcgtgccacatgtgagtgagcctcctaaaagtcatattttgtcattcttatttcattttcttttttaattttttctaaaacatagtttatagttggaaggttatttaatgtaatatttctattattataaatttgagcaaatagtaattcgcagatttcatcacaaaagtttttatctgtatcttcgaaagatttaatatcttcatagaataagtttttaaataaacgtctactaacgttgtctataaataacatgttttcataatattcaagatgataattaaaatatataaatagtctatctataatattttcttcactagagtataggaaagctgctgagtggataccttgtgttactgataaataagtagcataattagtatattttcttataacgtctttatctttattagtctttttatagtaaagcactaaactatttatgatatttgctgttctatgatctgaattatttgatttttgattttgttgtaataaataaaaataaatatactctattttatcatctatatttaatacttcttttgccattttatgtgctgaacctaatgaaataattggactgttataaaagtgtaaaatatattccgtttcaccaattattttattcccctttgaagttggaacatatacttgtggtagtttaatcgcattttcatctatattagttttgattctttctatcaattctggcttatttccacttaatttgagtttatattctcttaatatttcttttaattctgggactttaagataaaataaagaaacatcaaaattcgattttatatctagataatctaagttgattaatttgtttagaatttcatctacattaatttggttttctagcaaataaaaatgatttttaacttcttttccaacttctctatttttatttaggtgcaatattaaaatatcgttagcatttaaatcataatgataattattgttgttatcatctttaacatctataactaaatcttgattattttcttggacattttcattcaattttacttggtctttatttaatgtattagttttattgtttgtaattgactttacctgttttacttttttagtattattagtttcaatatcatgtgtgatattatttttcctaatatggtcatttgattgaacagtgttaaactgagtcgtcttagaattagatatatttttgtgattagtattggatttattgcttttataatctaaatgattatgcttaaacaatttaactatactaaatacaataagagatataaaaatagcaaacataaaaatatctataaaagtcaatttattttgagtaacttcatttattcctccaaatatcattaaaatagaaaatatcaatagaaagcaataaaatatctttttcattattttcccctttgcttaattttgtattatttttgattttcatcattatatattctttgaattactgaattaacaatctcgcttaacatttttttatcgctttctgataaaacttcattaaaaccaagagaatttttgttatctatgccactataaaacagcttatattcagactggtttaatagccattttaaatcaaagtaaggctcgtctatttcctcaatttggtattgattaaattcgttcatagtaagtttaatttcttttctttggattttacttgaatgctttttttgtttttctcggaattttttaacaaactcgtcatattctgttctcaattgttcatatcttatttttttgttttcactaaatatagttagtaatttttcaatatcatcatgcatttgagattgatccataaacaatacataccaaaataaaatatttttagatggaaagcgcttaccattttctaatttactaacatacacatctgatacacctaagtactttgaaagagtatctaaagttaaatcttcttcttttctaaaatttttaagaatgtttgaaaaatcttcaagactattttgttgcatgttttatcaatcctcctgtaaatatcctattgtctatgttgattattatacttttattcttattgttcgtaaacaagtaattaaaaacttgccaaaaggaagctaagatgttactatttgtttgtaaacaaaattaaagtttacaaacatttagcgtgaggaggtgtttttatgattgctaaagtgaattatttgaaacgtttgattgcatttgaaggattgagtttaaaagattttgcaagcgaaatagaagtgaattctaactttttgaattccattgttaatggtaaaagaacgacatccccaaaaacagctaataaaatagcgaaaagactcaatgttgatataaaagatattttcatctttatagaagaaaaagaggaggtcaaataaatggctagaacaaagttgaaagatataccgactaaggaaaatacaatcagtgaaccaaaacaagttgtagtaaaaccactgtttgctaaaccaaacgcgctagcaagtatttttggtatttcgtatagttcgacaaatcgtattttaaaagagtgggagaaagatcctaaaggtgttgacgatttgtattattcattgtcatcaactatgacggttatcagtattcctagatttgaggagtacatgaagaaacgtcataaaaaatggatgtaggaggcaaggcaatgaaaatgtacttaacttatatttgcttagtttcattgttaacaatactattactagcaatatctaacatgtatgtcgcttttagtgtgtacggcatgatggtaacttatggatttaatttaacaggagagattacaacgtgcgaaaacaagtgattattacaaaaacagtagttggctggtacaacattaaagatactcaacataatttaatgttaaatataccgccaaaagtatttgaacagtgctttcctgatgttagtaaagatgttcaagttgcgtgtttagaaatggatttatcaaaaattacagaaattaaaaataagaaaaaggtaggtagttaagatgaaaatcaaacaaaaatatcaattatcaaaagtggttaaagtattagaagtagtattatacgagaaaagtaaaacttatgatgatattagttatctcaatgaggatacagcattttatgaatgtgctttaaagttagttcataatggattgttcaatattcttgctgaattagattttgaagatgaagcatttttaattcttgatgaagtaacgatgacgctaagtgatgtcatgaaagaaacacaacacgtttatcgttatagtgtcatagatgaaaaaggtgaacataaacataaaacagatcgcaaaggacacgtgattgggatgttagagtgggcattagattacattgtgggaaatattgaagtggaggaattataaatgaattgggaaattaaagatgtaatgtgtgatattgaagtgataaaagaaaaaatcaatgatgtagctatcaaacatggttggtttgttgaagataaatttgtcaaaaatgaattagaaacaaaacgggaacatattaatttttctgctagctatttagaacatcgtatacaaaatgaacatacagttgagttattacaggtttatttaaaagagttcgatgaacttatacaaaaatttcatgaaattgaaaaagcatcatctgagaactttggcgaggtatcagatgacgcaaagaattcaataaaagtagcagagtaatatagaaattacacattcttattataacatctttgctctgttgtttcattaagaggtgcaaaaaatgaatgaaattaaattagaatatgacacacatgtttcagtggtacattatgaaagtttagactcacgttcatttaagagcttttcaaaacctaaatggagtaagttggttaataaactgtctgtacctatagaagcaaattataagtatgcacgtggtgttgctgtttacggtgatattaaaaacggtgcaaatgatcgcggtgaaattatcaaaaagcatcgcaatgataataatgtcatatacagagatgtgattgtaattgattatgatgaaataaatgatttaaagcaattacatgaagcaatcagctcagctttaagcaatgttgcatggttttggcacacaagttactcgcacagaactgaacaagctagaatacgcctgtatatccctctgaatgagcgaataagtgcagatgattatcgtaaatatacaaaagtattagcaaataaaattggtcataaagttgatgaaggttcatatcagccaagtagatgttttgcattaccagttattcaaaaagggcacatatttattaagcgagtgaatgactgtccaattatggatgttgatatgctcgagcagtggtcaaaggggtttgaacaatcaaatgttagtcctaatgttataggatacacgcgacgtgatagtgcgtactggcgtgagttaagctttggaacaaccgaaggcaatcgtaacaatgcactggctagtttggtgggtcatttattgagatgtcacgttaatgattatattgtttattcatttgctttattatgggggcaattcgcatgtaaaccacctatgaaagaacaagaaatcaacgctacttttcaatcgatattaaataaacactataacaattagaaaggagctttgtatggaaacaggtaaaagtgatgtacttgataaaattgaaaaaattaataaaaaagatagtgccttacaagaaattataccgaaaggttatgaaattgaacatcatcaatgcggtattgccttaaatcaacttataccaagtaaaaaagaaggcgagccagataaaaaggtttttatcacaagtacaatccctcaaatcactgaacgctttgaagatattgaaagtaacgaagtcagctttaatatgcttttctatgacaataaaacgcctgtaaatatagcagtgagtgccgaagaaatttcagatagtcgtcaactcttgaaattggttaataaaaagctagatgtaacatcgtcgacatctactaaacttgttgactatattaatgtatctaaacggtataacccaccattaaatgttaaagttgcaacgcgtttggggcatgtgaaaggttattttatttatccttatcaagaagtaatgaaagacagcaatgtcaagttgtttagcaatgataaagggtttcaaaagttaatagactcttttcgaagtaaaggaacactacaaggttactctaaaaaggtgtttgctcaaataaaagatttaccaatggtgatggttatgttgtatgcatctttaggttcggttttattaagagaatttggattacagccctttattgtagaaatatcaggtagtacatccacaggtaaaacattcacactcaacttagtatcaagtgtttggggaaccagtgaccttattacgacatggagttctactcaaaatagtattgaatcgatggcgtcatttttgaactcatttccaatgtttaaagatgatacacgtaacacacatcctaagtttgttaccagtgccacatataacttttctagtggcgaaagtaaatcaagaagtaatattaatttaacactaaacgctaaaaaagaatggcgaaatattttaatttctactggtgaatcatctatcgcaaatatggctgatgaaaaagcgggtgtatcagcacgtgtagttacactacaagatccaccatatccagataattttgattttaccacattagacaaatcgtttagggagaactatggaacgttagggttggcatttattaaacaatatgagtctaaaaaagacgtgtataagaaagcttttgagagctatcaacggtattttaatcaaaaaggtagtaatgaaatcatgcaacggttaggacgtgcctttgcgttactacaagttaccggtgaggttttgaatgatattgatggatttgaacatgatcattttaaaattattgaacaagcctatgacagcatggttaaaaacaataagacaattgataaacctaagcaactgttagaggaactattacaatatttagatgcgaatagaaataatattgctggtgatggttatagttcagtcaaaaatggcgacatcaaagctatatataaacgtgattatttatgtatattaggtgaaacagtcaaagagaagttaacacacgaattgcaaaccatcactggacaatgggacaaaaaaggatatttaattaaaggtgaaaaagacaggttacaaaaacaggtcaaacatcaaacggtaaagtataggggatttgctataaggcgagaagtacttgaagaattgggttttgacttttctaattcatataatcctaattctgattattgataagtacccatcggtacccgttgagtacccaataaaaaaataaaacgggtactcaataaacgcagtaatatcaagtctctaaagccataagtacccgaagtacccaatgtttattaatagtatttaattaaaataagttgttttgtaagaacattcatataatacaggtttcctattatataaaatacgggtacaacgggtactttttgcataaagtaacgtagtgacaagagtttgatagtacccgaagtaaaagaatcactggggactcactggggactagtcccctactaaaataaaaaacatcgaattaatgctggaggttacacatggataaagaacaacttaaaaagtatatatacgattatgtaaaagaatataaggagataccgatatatcagttagaagatttgtttaaagaaatgaatcatgactatttagggagaactagtatcacacacgataaggatgagaatgtagtgttttggagtggatggaacaaaattacaatgtttgcgttgattgaattagttaaaagtgaacaacttgatttagtgtatagaggtagttttgtaatgcgttatttgttggatggtagagttcctaatttaccattagctatttgttatccagaagatggacaacaaactgacgtgccctcatgggtgcctatggtattaagaataaataaagaggagaaaatcaaatgaacatagaaactatcgtaaatcaatttgaaacacgagcaggcacgttattaaggtactacacgggattattagaacatagtaaagtacaaccgtattgctttaagttatataatgatccgtttgatatgtgttatgtggtgatgaacgggaagttattcggtcatgtatatattaaagattgtaaagtaaggcaatcatttgaattagcgtcacctaaacacactgagggacttataagaagcatagaggggcattatgtaggttatgaattacatgacggtaaacagctttctattagtgatatgatggccagtcaattatttgaagatgagtattttatgtatgggctagaaacttatgcagaatcaaataatagtgatgtgtttgagtacctagaaaatggatttgatacagatacacttgagggcattcaatcgagtaatactgatgtgatagcgaatattgaaatgttgtatcagttagctacgggaatcaatgaaccagcaccagagttagttgaggggttgagattagtaactgagtttgtacaagatgagaaggctacacaagaggattacaaggctttagaacgtaagttaaatgatctaaaagcttcttactatagcctaagtgaataatgttatgaggggtcacatgtagtgtgtggctcctaatataaaagtacaaggtttatacaagatacacgaattttattaacgctaatacaagctaaagtttgtgtttttatcatagggtagtaaataaattcgttcgtaattcgttcgcgttattttaccgaacttaagttctgtattcaagtgatataaaaggctccttattaattttataatattgttttataagtgttatacgaggtaagctaaacaattgataaaacgcgctataaagcgaacgtaagtttgttttagacctgtaaaaatggtataatttaggtatggaataattaaaagaaaggggtgtagaaatgcaaagtatcgcagaaaaagagacgtatcatttacccaccgaacacctgcaagttttcaatgtgataaaaaatacgtctaataagtatattactaaaactaaaatcttaaatcaattaggatatgaatataattcaagcaatgaacgatggttaagaaaagtaatcaattcattagtatatgattatggctatcctatcggatgtagttataaacctagtgaacgtggttattacatcattacgacagaacaagagaagctacaagcaatgagaagtattaaaaagctagctgatggtagtatgaaacgctatgaagctttgaaacgaattgaagtgtaaaggggataaaaatgaaaactgaatcgtactttaaagaatacaaccaatttgtattagatcaacgcaaggctatacaagaattggaacaagagcgtaatgcattggaaagtaaaataaagttagataagtccacatacaaacagttaatcatggatggacaagatgacaaggcagataacctatatcaagcaacagatgctgatgaaaagaaactaaaagcacttaataaacgcttagagacaaagaaaagtgtatcgaaagaagttaaatatcaaaagacaattgagttattaaaacatcaaagcgagttgtcatcattatatgaatcagaaaaacaatcagctttaggtaaattaaaaaaggtagtcgatgcatataatgagatcattgatgaaatagaagatattaatgatagatatgaagatgagcatcagcaatatgcgagtatttatagtcaagaacaattatatgatgataaagaggctagggaagcattgaatggctactttagagaaaatatatttacatcatatattaatggtaatgatttgccatacgaacacaataacaagttgtttttaaaacgttaaaaagaaagggtaattaaatggaaacaaaatacgagttaaataatactaaaaaggtcgcaaatgcatttggtttaaatgaagaagatacaaatctattaataaatgcagttgatttggatattaaaaacaatatgcaggagatttcaagtgagttacaacaatcagaacagtctaagcaaaagcaatatggtacaacgctacaaaatttagctaagcaaaacaggattattaaatagcaatgattgcctatccaattcgggtaggctctgtttataggggtgaataaatgaaactgcttaaaacgaagaattgtttatattatcgtaatggtgacaataaattatctgattatcaactattaacgcaatttaacccagcatttattaataagaaaattaagatgtgtgaattccaaattgaaagtatgtaccatatgagtgcatcgacaacaacatgtgatgaaataatgggggtcgtgtctgtctcatatccaattgaaaaactagttatcaaaattattgaaacaaaggcaagattacaaaactataaaaatcgatctataagtaatatggtgttgttgaaaacggtactaaatcattatacagaaagagagcagaagcaagttgtaaaatatatgcgttcaaatggacgatataagccctacaacgtcattgaacgcttacaggttgatttgtatcaagcaagtattaaacaacgttcagaacgtcaaaaacaaagaaatatagcaattgaaaatagcaagattgcacgagtaaatgcttatcaccaatcttcacatgtaaaagtggtgtaacaatggataaacagcaaataaaaggcttcgtttgtgattatcatgagcgaactagaagtgatgtattaatagatgatgatataaatactgatgaattcttttcaataggtgatgaaaattctaatgaatggatgacagacgataacattgatgatcatattgtaaagaatcacttagaaatgattgttgaccgagtagctaatgataaagagttttatattttcgattctttgatacaaggacgtagttttaaagatattagcaatgtcttagagtgttcagaacaatctgtaagattatggtatgaaactttattagataaaattgtggaggtgatagaatgagtgatttaacagcaaaacaagcgcgttttgtgaatgagtatataagaacacttaatgtaacacaaagtgccataaaagcaggctatagcgcaaatagcgcacatgtgacagggtgtaggttattgaagaagccacacatcaagcaatatatacaagaacaaaaagataagattatagatgagaatgtattaaccgcaaaagagttactacatgtgcttacgaatgcggcagtcggtgatgaaacagaaacgaaagaagttgtagtcaagcgtggagaatataaagagaatccacaaagtggcaaagtacagctagtctataacgaacatgttgaactgatagaggtaccaattaagcctagtgatcgtttaaaagctcgtgatatgttggggaaatactataagttatttacagataagcatgatattaacggcaatgtgcctatattcattaacattggtgaatgggacggagacgatgaggaattagataaggcagtgaaagatgtatctaacgctaatcctaatcatactgtgattgtggatgatataccgttagaggattaatgaggaatatttacagataaataagatgtgaatcttgtggcaccagaatttgttgatgatataaagagattttagaaataaagaaaacagcaagtttacttgtcgaaatgtgatgcttgaagaatgattacttactaatttaggtacatattataaatcggattatcgattcaataaggttgtatttaataaatattatatgtcaacatttttaaattaacttgacaaatttaagtgaatgtatggtaaaaaatgttgaaatgtactatattataaataagggttgcatataagcaacacatcttggcgaatacacataaagatatttattgtttttgtgtacgaattatagaaagcatatacacggtgacagcgtagggacgctgtcatttttgtttacagaaaatgaattaaggaggaaatatactttgatttctaatatttcaatttttgcaaaagacgataaaatgcaagttagtgataagtttaatcaaatagtcgctaaaatggattatttaaaaaacaaaaggaatcatttagttcatagttccaaaatagcagaagatgaaaaaaagtttttagaaacctatattaaaatagaaaaatataatgaaagtaatatctatttaaaagatgataaagttaatataaagagaaagttgaatcaaaataattttgattttgaaatggttaaagacatttttgaaatcagagaagaattagttgatttagagatagaagacttaagtattaataatatagaaagctcatatatttttgaaagcactttttttgctgatgtattagatgatgtgaattttgcaaaaaaacaaaatttacaaaaaaaacgtaattcgaaatcacttgaaagtgaaaatgtttacaaagataaaaagaaattgttgaatacagacataaaaacaaaatttgatatggtgacgttatgataaaaaaaataaaagatataataaaattggaagttaattatttaaataggattgataaagataatactgacaatgatgggataatattaaaagcaaataacaatgtaaatttaccaaatgaagataatgaagcttatgtagaaattatttttactatgagaagtgtagaatctaattcatgggaaaatgagaaaaataaaaagagaattttagatgatgaaaatgatcaaaatataattggcaaattaagagttaattataaaataatatgtgatttcagtacagagagggaagaaaaaatgagagatgcacttttagaaattatagaaccttatttcagaaaagaagttgaaactttattgtcaaatatgaaattaccaaattttattcttccttacaggttttgggaaaatgaagataactaatataagattaaaaagtgcaaataaaaaaagtgttaaaaaactttactttcttgaaggtatagatgctatagaaaaaatagagaataattacgaaaaaaagtttttttagtctctatacttgaggggatcagacaatactcaacacaaaattataaaatagaatgtgattttaaaaaatttcattatagaatatttcagtattataggataattaagagaaaattaaaagagacagtaaaaaattttgatgaaaaacaagtacagacgttatcaaaaatttataataaattatgcaatgttagtgataaaaataattatattggacaaattttggagtatacttatataaaatatatcagaactgaggattctgtgtataaaattggtcatgaaccaatagtatatcataaacgtaaatcactgcatggaaaagaatcttatagcaatagattattagattttgtgactatagagaatagaaagacgataattttatgcgaatgcaaagcgaacttgcaaagagagtttcaaggtttaatcaagcattttaataaaccatttagacagaagttacagttgatgaatcatttagaagataagttaaagcaatgccattctggaaatgaaaaacctaataactttgtagaaatcaaaaaagtattagtaactgcatttgcgccgactaatcaacaaaacttacctagaagatatcaacgagaaatacccatacttacaattagcgatatgaaaaatatggtgttataaatttatttgaagaacaacttttaagggcataaaaaaggcataatgttggtgataagggcaagtgtatggactataaaacactttgaaacgcttataaacacctatataacagtgttttgaatgctcatgaactcccttgataatacacttagttattcctgctaaataaatcatattaatggctcagtaacgtgatgttgctgggctttttaatttaaacaggtatttatatgatatttaggaatgagatgctattacggataaagtaaaatcctatatgcatgcgtgctactcatttattcttatttttaatttcacatggctagtgactaatacatcataaatcattagtgattctttattatttcagtcccactccctcaagttaatgatgaatctatttcgctagttataaaatgacgtcaaatcaatatcaaaaattatttaagtaaaatgtttagataatttttcagtgggtaagtattatatataacatttaattattccgaggaggcatttattatggcagacgaaagtaaatttgaacaagcaaaaggtaatgttaaagaaacagtaggtaatgttactgataataaaaatttagaaaacgaaggtaaagaagataaagcttctggtaaagcgaaagaattcgttgaaaatgcaaaagaaaaagcaactgattttattgataaagtaaaaggtaacaaaggcgagtaattttactttttattcctaatacactgcacatgccacttagtcggtataaccatcggctaggtggtttttgtattaaaaaagtggataccaaaatttattaataattattttaatgttagaaaaaaactaaataaaaactcgctaatgatatccaataatatgtatacaaaacgagacatatattgcatatgattaacgagatactgaaaatattttatcacccctaaaatgattattcattttcagcggtaattcgacctaaagtcaaacttacaataaaaccgatgataaatactactaatgaaacgaaccacatcacgatattagttggtaaacctggaaatactgcaaagagggagccaacaacaaaaccaatgattaatgcaaaagtcattagtttatgatgtgttaggaaatactggataattttgcttgaaataatgaatccagcaagcacgccaaatccgactgcaagtaatataggaagacctgcaaagttaagtttaacaacttcagatattgctagcatgaccgtaccatagacgccaaatactaataacataaatgaccctgaaatacctgggagtaacatagcactagatgcacacatacctgcaataaaatatttaataataagactagttgatagagtaagtgtttctccagcatgtttatcaccattattcattaatgtaataacaattaagatagcgataccagctataaccatcatgtaatgtttagttgtaaatgacgttttatagttagaaattttcaataaatatggaacgataccaatgattaatccaccaaagaaaaacatagttggaatatggtgttggcttaataaataattaaaaagattacttagtgatcccattgccagtaacattccaattataatggggattaaaaatgtaaaacttggccaaaaacgtcgtgagaatatgccgctaattgaagcgataaattgattgtaaatacctaacaataatgcgatagtcccaccgctaacaccaggtaccaagtcactcgttcccatagcaaaaccttttagaatattaatccatttaaattgttgcatgaataactcctttcaaacgattggaataaaatcataaatagcatcataccatattacaaatgtcctagtgaaatgataacatattttaaattcataaaatccattgagaaattatgtgcacttattatcatttatatttttaaagagagcggattagagttgtactttagagttattaaaaataataaaaagggtttaagttgtttatattaaggtataagtaagttataattaactgaacgcattattacaaagtctttttgactacaaattaaaattattataaactagttaagaaaactttatattttacggaggggatataaaatggcatcaacattagaaatcaaagacctacatgtgtctattgaggataaagaaatcttaaaaggtgttaacttgacaattaacactgatgaaatacatgcgattatgggaccaaacgggacaggtaaatcaactttatcatctgcaattatgggacacccaagctatgaagtaactaaaggagaagtacttttagacggtgtaaatattttagaattagaagttgatgaaagagcaaaagcaggattattcttggcaatgcaatatccatcagaaattacaggtgttacaaatgctgatttcatgcgttcagcaatcaatgcgaaacgtgaagaaggacaagaaatcaacttaatgcaatttattaagaaattagataaaaacatggattttctagacatagataaagacatggcacaacgttatttaaatgaaggtttctcaggtggagagaagaaacgtaacgaaatcttacaattaatgatgttagaacctaagtttgcaatcttagatgaaatcgattcagggttagacatcgatgcattaaaagttgtatctaaaggtattaaccaaatgcgtggggaaaactttggtgcattaatgattacacactatcaacgattattaaattacattactcctgataaagtacatgtaatgtatgctggtaaagtcgttaaatctggtggtccagaattagcaaaacgtcttgaagaagaaggatatgaatgggttaaagaagagttcggttcagctgaataatcttattaatacagtatccatgagatgttcatctatatatgatgaaaatgaacatttatacgaaatagtaaatttcatcaagtaggaggaaaaagttatgacaactgatattttgaacatttctgaagaacaacttgttgattattctaaagcccacaatgaaccttcttggatgacagaattacgtaaaaaagctttgaaattaacagaaactttagaaatgccaaaacctgataaaacaaaattaagaaaatgggattttgattcttttaaacaacacgatgtaaaaggtgatgtttatcaatctttatcacaattacctgagtcagtaagagaaattattgacgtagatcattctaaaaacttagtaattcaacataataatacgattgcgtacacacaagttgatgataatgcatcgaaagatggcgttatcgttgaaggtttagcagacgctcttatgaaccatagtgatttagtacaaaagtactttatgaaagatgcagtaacagtagatgaacatcgtatcacagcgctacacacggcattagttaatggtggcgtatttgtttatgttcctaaaaatgtagttgtagaacatccagtacaatacgttgtgttgcacgacgacgaaaatgcaagcttttataaccatgttatcatcgttactgaagaaagcgccgaagtcacatatgttgaaaattacttatcaaatgcatctggtgaaggaaatcaattaaatattatttctgaagtgattgctggtgcaaattcaaatatcacatatggctcagtggactatatggataaaggctttacaggtcatatcattcgacgtggtattactgaagcggatgcctcaattaattgggcactaggtttaatgaatgagggtagccaaattattgataatacaacaaatttatttggtgatcgttcaacaagttcacttaaatcagtagttgtaggtacaggcgaacaaaaaattaatctaacatctaaaatcgtacaatatggtaaagaaacagatggttatatccttaaacatggtgttatgaaagaacatgcatcgtctgtatttaatggtatcggctacattaagcatggtggaactaaatcaattgctaatcaggaatcacgtgtattaatgttatctgaacatgctcgtggtgacgcgaatcctattttattaattgatgaagatgatgtacaagctggtcatgctgcatcagtaggtcgtgttgatccagatcaactttactatttaatgagtcgtggtatttctcaaagagaagcggaacgtcttgttatacatggtttcttagatccagtagtacgtgaattacctatcgaagacgttaaacgtcaattgagagaagtaattgaacgcaaagtttctaaataatattttgaaaataaaagtttgtaatagatatagactgtcgatattggtataagactaatacaacgtcagtatttaaatgattaggatttttatttaagaaaggtcgtgaatgaagtggccgaacactcatttgacgttaatgaagtaatcaaggattttccgatattagatcaaaaagtcaatggcaaacgtttagcatatcttgattcaacagcgacaagtcaaacgcctgtgcaagtgttaaatgttttagaagattactacaagcgttataattcaaacgttcatcgtggtgttcatacattaggatcattggcaactgatggttatgaaaatgcccgtgaaaccgttcgtcgttttattaatgcgaagtattttgaagaaatcatttttacacgcggaacaactgcgtcgattaaccttgtagcacatagctatggtgatgcaaatgttgaagagggcgatgaaattgttgtcactgaaatggaacatcatgccaatattgttccttggcaacagttagcaaagcgtaaaaatgcgacattgaaatttataccaatgacagctgacggtgaattaaacatcgaggatattaagcaaacgattaatgataaaacaaagatcgttgctattgcacatatatctaatgtgctcggtacaattaatgatgttaaaaccattgcagaaatagctcatcaacatggtgcaattatcagtgttgatggggcgcaagcagcaccacatatgaaacttgatatgcaagaaatgaatgctgatttttatagttttagtggtcataaaatgcttggaccaacaggtattggcgtattatttggtaaacgtgagttactacaaaaaatggaaccgattgagttcggtggcgacatgattgattttgtaagtaagtatgatgcaacatgggctgatttacctactaaatttgaggcgggtactccattaattgctcaagcaattgggcttgcagaagctattcgctatttagaacgcataggttttgatgcaattcataaatatgaacaagaattaacgatatatgcttatgagcaaatgtctgcaattgaaggaattgaaatttatggcccgccaaaggatcgtcgtgcaggtgtaataacgtttaatttacaagatgtacatccacacgatgttgctacagccgtagatacagaaggtgtagcggttagagctgggcatcattgtgcgcaaccgttaatgaaatggttaaatgtgtcttcaacagctagagcgagtttttatatatacaacacgaaagaagacgttgatcagttaataaatgccttgaaacaaacgaaggagtttttctcttatgaattttaataatctagatcaattatatagatctgtcattatggatcattataaaaatcctagaaataaaggtgtattagataacgggtctatgacagtagatatgaataacccgacatgcggtgaccgtatacgactaacatttgatatagaagacggcattataaaagatgctaagtttgaaggtgaaggttgttcgatttcaatggcaagtgcatcgatgatgacacaagctgttaaaggtcattcacttggagaagcaatgcaaatgagccaagaatttacgaaaatgatgcttggtgaagactatgtgattacagaagaaatgggagatattgaagcattgcaaggtgtatctcaattcccagctcgtattaaatgtgccacattagcttggaaagcattggaaaaaggtactgttgctaaagaaggtaaagcagaaggtacgactgaagaagaatagaatgctgttaatcatagataattttgatattagacatataaaagtataaaaatttttataagatgtcatgtcattgttataatatggtttacatcatgaattaaaaacttacgcacgccgttgtaaatatatttttaaggagtgattgaaatggctaaaaaagcacctgatgttggggattataaatatggattccacgacgatgatgtgtccattttcagatcagaacgtggtttaactgagaatatcgttagagaaatttctaacatgaaaaatgagccggaatggatgttagatttccgtcttaaatcattaaaattgttttataaaatgccaatgcctcaatggggtggcgacttatcagaattgaatttcgatgacattacttactatgtaaagccttcagaacaagctgaacgttcatgggatgaagtgccagaagaaattaaaagaactttcgataaattaggaattcctgaagctgaacaaaaatatttagctggtgtttctgctcaatatgaatctgaagttgtttaccataatatggaaaaagaacttgaagaaaaaggtattatctttaaagatacagatagtgctttacaagaaaatgaagaattattcaaaaaatactttgcttctgtagtacctgcagcagataacaaatttgcggcgttaaactcagcagtatggtcaggtggttcgttcatttatgtacctaaaaatatcaaactagatacgccactacaagcttatttccgtattaactctgagaacatgggtcaatttgaacgtacattaatcattgctgatgaaggtgcttctgtacattacgtagaaggttgtactgcaccagtttatacaactagttctttacactctgctgttgtggaaatcattgtgcataaagatgcgcacgttcgttatactacgattcaaaactgggcgaacaatgtatacaatttagttacaaaacgtacttttgtttatgaaaacggaaatatggaatgggtagatggtaacttaggttctaagttaacgatgaaatatccaaactgtgttcttttaggtgaaggtgcaaaaggtagtacattatctattgcatttgctggtaaaggacaagttcaagatgccggtgctaaaatgattcataaagcacctaatacatcttctacaattgtttctaaatctatttctaaaaatggtggtaaagttatttatcgcggtattgttcattttggacgtaaagcaaaaggtgctcgttcaaatattgaatgtgatacattaatcttagataacgaatcaacatcagatacaattccatataacgaagtattcaacgatcaaatatcattagaacatgaagccaaggtttcaaaagtttctgaagaacaattattctatctaatgagtcgtggtatttctgaagaagaagcgacagaaatgattgttatgggattcatcgaaccatttacaaaagaacttccaatggaatacgcggtcgaaatgaaccgtttaatcaagttcgaaatggaaggtagtattggatagctttaaaccgcgttgttaagccattcttgacttccgaatatggctattgataccattttgatactgaatataacaaaaagccacattactgtggctttttttgttttataactaaatcggattgatagataagctttgtacttatttatatcagttcgattttttgattggtgtaaaaaataatcattgatggtggataaagcgacaacacaaatacaacatgattgtggcattagagtgctggtctttattaaattaattgaaagctacatcaaatattctttagataattcgatattagttcgattaagattcgttgtataagtgagttaaaataagaaaactattaataatattaagttcactacagatgttgctaatggaccataagttttaaagacatcttcacttttataaccaacaatcgcatctaaaaattgaactaagatcattgcaatggatatagttatcaaaaatatagcactatgaatgactaaagaaaaaatagctaataaaaataaaggtaagcttcgactaagtgcataatatgcatttatattatggctagatgcacatgcttgaattgaataacctaaacttacactggcactgattattgtaaatattgctaaaacaaaatacatgttaatccttctttctatatttggatataaacaagtacttgtctaaagttatttaaaagataattagaataaatttatgagaaactggttgttatcattataatggtttcaaatgattataactatgtcataaactgaatttgttgaaatttttcattatgcaaatttattaataacaaacagctcgaactatagcatcattttactaatgaatgcattaaagtaactatgactaaaaatgcatattaattatcattattaagactattatatataatgaattttaactggtttattaaacgagaacgtcgggaattaagtaactacaataaaaataagatatgacaataaggagactacacgcgtgatcattgccataattatattgatatttatttcgtttttcttttcaggaagcgagacggcattaacggctgccaataaaacaaaatttaaaactgaagctgacaaaggtgataaaaaagcaaaaggcattgtaaagttacttgaaaaaccaagtgagtttattacaacgattctaattgggaataatgtcgcgaatattttattaccaacacttgttacaattatggctttacgttgggggattagcgttggtattgcatcagctgttttaacagttgttatcattttgatctccgaagtgattcccaagtctgtcgctgcaacatttccagataaaataacaaggcttgtatatccaattattaatatttgtgtcattgtgttccgtcctatcacattacttttaaataagttgacggacagtattaatcgaagtttatctaagggccaacctcaagaacatcaattttcaaaagaagaatttaaaacaatgttagcaattgctggacatgaaggtgctttaaatgaaattgagacgagtaggttggaaggtgtcattaattttgaaaatttaaaagtaaaagatgtagatacaacacctagaattaatgtgacggcatttgcttcaaatgcgacatacgaagaagtttatgaaacggttatgaataagccatacactagatatccagtgtacgagggagatattgataacattattggggtgtttcattctaaatatctgttggcttggagtaataaaaaagaaaatcaaattacaaactattcagctaagccattatttgtgaatgaacacaataaagctgaatgggtattacgtaagatgactatttctagaaaacatttagcaattgtgttggacgaatttggtggtactgaagcgatagtgtcacatgaagacttaattgaagaattattaggtatggaaattaaagatgagatggataaaaaggaaaaagaaaaactttctcaacagcaaattcaatttcaacaacggaaaaatcgcaacgtatctatataaggagcgaacagctatgtggaataagaatcgacttactcaaatgttaagtattgaatatccaattatacaagcaggtatggcaggaagtacgacaccgaaattagttgcatcagtaagtaacagtggtgggttaggcacaataggcgcaggttactttaatacgcagcaattggaagatgaaatagattatgtacgccaattaacgtcaaattcttttggcgtaaatgtctttgtaccaagtcaacaatcatataccagtagtcaaattgaaaatatgaatgcatggttaaaaccttatcgacgcgcattacatttagaagagccggttgtaaaaattaccgaagaacaacaatttaagtgtcatattgatacgataattaaaaagcaagtgcctgtatgttgttttacttttggaattccaagcgaacagattataagcaggttgaaagcagcgaatgtcaaacttataggtacagcaacaagtgttgatgaagctattgcgaatgaaaaagcgggtatggatgctatcgttgctcaaggtagtgaagcaggtggacatcgtggttcatttttaaaacctaaaaatcaattacctatggttggaacaatatctttagtgccacaaattgtagatgtcgtttcaattccggtcattgccgctggtggaattatggatggtagaggagttttggcaagtattgtcttaggtgcagaaggggtacaaatgggcaccgcatttttaacatcacaagacagtaatgcatcagaactactgcgagatgcaattataaatagtaaagaaacagatacagtcattacaaaagcgtttagtggaaagcttgcacgcggtatcaacaataggtttatcgaagaaatgtcccaatacgaaggcgatatcccagattatccaatacaaaatgagctaacaagtagcataagaaaagccgcagcaaacatcggcgacaaagagttaatacatatgtggagtggacaaagcccgcgactagcaacaacgcatcccgccaacaccatcatgtccaatataatcaatcaaattaatcaaatcatgcaatataaataatcgaccgcaatccacaaaagcacaagcacccccaaacattattttagtgcttgccatttttgtggattgcgtttctattttaccaatttaatcaaacgaaaacatcaagctgaagatcgccgaaagattttaatcaagcaaaaacatcaaactaaagttcgctgaaatgattatgataaaagttatatggtatgatgacattggtgatatatatgataaacatcggattaacaggttggggtgatcactattcattatatgaagatttagaacgccaaaccgataaacttaaaacatatgctggacattttccggttgtcgaattagatgcgacatactatgcgatacaaccggaaagaaatatattgaaatggataaaagaaacgcctgatacatttgaatttgtggtcaaaattcatcaagcactcacattgcatgcagactacaaaacatttgcagatacaaggcaagaactatttgatcaatttaagaatatgttagagcccttacatacacagaaaaaattagcaatggtattggttcaatttccgccatggtttgactgcaatgcacaaaatatcaaatatattttgtatgtaagacagcaattacaagcatttccaatgtgtgtagaatttaggcatcaatcatggtttagtgatgcatttaaagaacaaacattggcatttttaacagaacatcaaatcattcatgcagtagttgatgaaccacaagtgaaagatggcagtgtacctttagtcaatcgaatcacaaatgaaattgcgtttgtacgttatcatggacgtaatcattacggttggactaagaaagatatgtcagatcaagaatggcgcgatgtacgctatttatatgattataatgagcaagaattaatagacttggcacaaaaggcacaaatattagcacaaaaagctaagaaagtttacgtcatatttaacaataattctggtggtcatgcagcaaataatgccaaaacatatcagcgattattgaatatagaatatgaagggttagcaccacaacaattaaaattattttaagaggcgacgactatgttattaacaattacattattagttttaatcggaggtttgtcagcgattatagggtctatcgtaggcattggaggcggtattattatcgttccaacaatggtttacctcggtgttgaacatggattactacataatattacaacacaagtagcgatagggacgtcttcagtcattctaattgtgacaggactttcttcatcacttggatatttaaaaacaaaacaagttgatattaaaaatggttccatctttttatttggactattaccaggttcattgcttgggtccttcattagtagatatttaacatttgagtcatttaatttatattttggtatctttttaattttcgtagccattttattaatggtaagaaataagattaaaccgtttaaaattttcgataaacccaagtatgaaaagacttatgtagacgctaaaggtaaaacatatcattatagtgttccaccattgtttgcttttattacaacgtttttaattggtatattgacaggtttatttggtattggaggtggcgcactaatgacgccactaatgcttattgtatttagatttccacctcatgtagctgttggaacaagtatgatgatgattttcttttcaagtgtcatgagttctatagggcacattgctcaaggtcacgtagcttggggttatgcaatcattttaattatttctagttattttggtgcgaaaatcggtgtcaaagtgaatcaatcaattaagtcagatacggtagtaacattattgagaacagtaatgttgttaatgggtatatatttaattattcgtgcgttgatttaatacaactttaaaaggaggacgtcaatttgaggcttacaatttatcatacgaacgatattcatagtcatttacatgaatacgaacgcattaaagcatatatggcagaacatcggccacgacttaatcatccttctttatatgttgatctaggtgatcatgtagatttatccgcacctataactgaagcaactttaggtaaaaagaatgtggcattactaaatgaagcaaaatgtgatgttgcaacaatcggtaataatgaagggatgaccatttcacacgaagctttaaatcacctttacgacgaagcaaaatttatagtgacatgtagcaatgttatagatgaatcaggtcatttaccaaataatatcgtttcttcttatattaaggacatagacggtgtgaaaatactattcgttgcagcgacagcaccttttaccccattttatcgtgcactaaattggattgttaccgatccacttgaatctataaaagaagaaattgaacttcaacgaggtaaatttgatgtattaatcgtgctaagtcattgtggcattttcttcgatgaaacattatgccaagaattgcctgaaattgatgtcatttttggtagtcatacgcatcattattttgaacatggtgaaatcaataatggtgtactgatggcggcagctggaaagtatggtaattatcttggagaggttaatttaacttttgaggcacataaagtagtacataaaactgcaaagattattcctttagaaacattacctgaagttgaaacttcatttgaagaagaaggaaaaacgttaatgtccaattcagtaattcaacatccagtagtgcttaagcgtagtatgaatcacataactgaagctgcatacttattagctcaaagtgtttgtgagtatacacatgcacaatgtgccatcatcaatgctggcttactcgttaaagatattgtaaaagatgaagtgacagaatatgacattcatcaaatgttaccgcatccgattaatatggtaagggttagactttttggtgtgaaattaaaagagattatagctaaaagtaataaacaagaatatatgtatgaacatgcacaaggtttgggtttcagagggaatatatttggaggatatattctttataatttagggtacattcattctacagggcgttactatctgaatggagaagaaatcgaagacgacaaagaatatgtactaggtacgatagatatgtatacgttcggtcgttatttcccaacattgaaagaattaccaaaagagtatttaatgccagagtttttaagagatatatttaaagaaaaattattggaatattaaaaagtaagattattggattttcatttgtcatgaatttcgatataatgtttaaagatacacttaacaggagggtatgtgttgttatggcgacaaaaaacgaggaaatattacgtaaaccggattggttgaaaataaaattaaataccaacgaaaactatacaggacttaagaagatgatgagggaaaaaaatcttaatactgtatgtgaagaagctaaatgtcctaatatacatgaatgttggggtgcacgtcgtacagcgacatttatgattttaggtgccgtatgtacaagagcttgtcgtttttgtgcggttaagacaggtttacctaatgaacttgatttaaatgagcctgaacgtgtagctgaatcagttgaattaatgaatttgaaacacgttgttatcactgctgttgcgcgtgatgatttaagagatgctggttcaaatgtttatgctgagacagtacgtaaagttagagaaagaaatccatttacaacgattgaaattttaccatcagatatgggcggggactatgatgcgttagaaacattaatggcgtcaagacctgacattttaaaccataatattgaaactgttcgtcgcttaacaccgagagttcgtgcgcgtgcgacttacgacagaacattagagtttttacgtcgttcaaaagaattacaaccggatatcccaactaaatcaagtattatggttggattaggtgaaactatagaagaaatttatgaaacgatggatgatttacgtgcgaatgatgtagatattttaacgattggtcaatatttacaaccttcacgtaaacatttaaaggttcaaaaatattacacgcctttagagtttggtaaattaagaaaagtggcaatggataaagggtttaaacattgccaagctggacctttagtacgtagttcttatcatgcggatgagcaagtaaatgaagctgctaaagaaaagcaacgccaaggtgaggcacagttaaatagttaatatttaaccattaataaggcataaaggcttagtttgtacaaaacgaacgtgtcatagaagtaatcattatttttatgaaacactaaaagtataaactgagcctttcattgtcatagataggtgaagaatttgataaaagtagatcaacattactttgaattaatagaaaattatcgcgaatgttttaatgaagaacaatttattgctaggtattcagatattttagataaatatgattacatagttggtgactatggttacgatcaattacgattaaaaggtttttacaaagattctaataaaaaagcagagatgagtaaacgtttttcaaatattcaagattacatatttgaatattgtaactttggttgtccttactttgtattaagacatttgtctaaacaagaggttaaaaagttaatcgaagaagttcatccgtctgatgtgatagatgacgacaataaacttcaagatgtgaagattaagccaaccattcaagatactgaacattaataaaacccttagctagattgaaaatgggaatcatgcaattcaagcatggacctgtaatctagttaggggtttttatctttaatgaatgacttcatttaaatactcagtaatttcatcgccttcttcagcatttacacctaaaatatgagcgatatagccttcttcttttaaatcatcagtaccgataataccgaatttatttgtttgcatattaagtacgagtgtcttaccataatgtctatttgtatggactaacatcaaatcatatcgactatgctcgccaacaaaaccaacaaactgaacttgactctcttcgttgtcatcatataaatacatatcaatcattttgtagcgactccttttaaaagtagtaaagttagtataacgacaaatgaagtatactgcaaaattatgataatatataagtgagaggtgacaaggaatgtattttgtagacaaagataaactaactcagaaattagcctatttacaagcattaactgatgattatcatgagagcaagcacaatcattatgcatttgaacgcattgctcaaatgttgatagaatcatcggtagatatagggaatatgattatcgatgcatttattttaagggatcctggtaattataaagatgtgattgatatattagaactagaaaatgttattactaaagaaacacagcaggcgattaataaaactgtcggtattcgtaaacaatttacatatgattacacagccttagatattaagattatcatgccaatgtttgatgacgcattaccttattacaaacaatttattacagaagtaacgacatttttacatcaagaaaatgtaccagtaacagcttttggtaaaggagaaaatcaataatgaaacagtataaagcgtatttaatcgatttagatggcacaatgtatatgggaacagatgagattgatggagcaaaacaattcatcgattatttaaatgtaaaaggcattcctcatttatacgtaactaataattcaacaaaaacacctgagcaagtaactgaaaaattacgtgaaatgcacattgatgctaaaccagaagaggttgtaacgtcagcgttagccactgctgattatatttcagaacaatcaccaggagcatcagtatatatgttaggtgggagtggtttaaatactgcgttaaccgaagcgggacttgtcattaaaaatgacgagcatgttgattatgtagttattggacttgacgaacaagttacatatgaaaagcttgcgattgcaacgttaggtgtaagaaatggtgcaacatttatttctacaaatcctgatgtatcaattcctaaagagcgtggtttattacctggtaatggtgctattacaagtgttgtaagtgtatcgacaggtgtatcgccacaatttattggtaaaccagaaccgattattatggttaaagcattagaaattttaggattagataaatccgaagttgctatggtaggcgatttgtacgataccgatattatgtctggtattaacgtaggtatggatacgattcatgtacaaacaggtgtatctacgttagaagatgtgcaaaataaaaatgtgccaccaacgtattcttttaaagatttaaatgaagcaatagctgaattagaaaaatagatatagtcattttataaagtaggtgaattgatttggtaaaaatagttgtttcgaggaaaattccagataaattttatcaacaattaagtaaacttggtgacgttgttatgtggcaaaaatcattagtgcctatgcctaaagatcaatttgtgacagcacttcgtgacgcagatgcttgttttattacattaagtgaacagatcgatgcagaaattttagcgcaatcaccaaatttaaaagtaattgcgaatatggctgtaggatatgacaacatcgatgttgaaagtgcaacagcgaataacgtggttgtcacgaatacaccaaatgtacttactgaaacaactgcagaattaggatttacattaatgcttgctatagcacgccgtattgtagaagctgaaaaatatgtagaagcagatgcatggcaaagctggggtccttatttattgtcaggtaaagatgtcttcaattcaactattggaatatatggtatgggagatattggtaaagcttttgcaagaaggttgcaagggtttaatactaatattctttatcataatcgatcaagacataaagatgcagaggcggactttaatgcaacatatgtttcttttgaaacgttgttagcagaaagtgattttatcatctgtacagcgccacttacaaaagaaacacatcataaatttaatgctgaagcatttgaacaaatgaaaaatgatgcaatttttattaatatcggtagaggacaaattgtagatgaaacagcattaatcgatgcactagacaataaagaaattttagcatgtggtttagatgtattagcaaatgaaccgattgatcatacacatccattaatgggacgtgataatgttctgattacaccacacattggtagcgcatcagtaacaacacgggacaatatgattcaattatgtattaataatatagaagcggttatgacaaatcaggtaccacatactccagtaaattgaaaataagtatggtttttaatcattggtaaaacaagcaaagcaattgttaaatatgttatgcttgacttgcgaatgtatatatttgcgctgatgataattcaataacattataaactcgtcatattaatgtgatgagtttatttgattttgacgtatataacaaaattgttatatagactgtaattgtttattgtttaaataacctttaaaatgaatgatgttctcaacaaagtgtatcatttacaataattgagtgatgacaaccaattactatgttgaatctataaaattaaaattgaatttcattatgaatatcgatataatgaattgtaaaaaacaaattttaaaacgtattttatattgaacggtctttataaaggcgtttttactaagaactttaagaggtgcaatatgaaatctaaaagtaaacagccacctaataaatatgttgaagcattcaaaccatatttattaacactattgtatttggcaatatttattactttatatttaatttatggcagtggcgacacacacaataacttcatttataatgagttctaatgagggagacttaatatgacagatattattaacaagctgcaagcgtttgcggatgcaaatccacaaagcattgctgttagacacacaactgatgaattaacttatcaacagttaatggatgagtctagtaaattagcacatcgattacaaggtagtaagaaaccgatgattttattcggtcacatgtcaccatatatgattgttgggatgattggtgccattaaagcaggatgtggatatgtacctgtagacacttcaattcctgaagaccgtattaaaatgattattaacaaggttcaaccagagtttgtatttaatacgactgatgaatcatttgaaagtttagaaggcgaagtatttacaatagaagatattaaaacatctcaagacccagtaatttttgatagtcagattaaagataacgacacagtatacacaatctttacatctggttctactggggaacctaaaggtgttcaaattgaatatgcaagtttagttcaatttactgagtggatgttagaacttaataaatcaggaaatgaacaacaatggcttaaccaagcgccattttcatttgatttatctgtaatggctatttatccatgtttagcatcaggcggtacattaaatcttgtagataaaaacatgattaataaacctaaattattaaatgaaatgctaacagcaacaccgattaacatttgggtatcaacaccatcatttatggaaatgtgtttattattaccaacgcttaatgaagaacaatatggtagtcttaacgaattcttcttctgtggtgaaattctacctcacagagcagcaaaagcgttagtaaaccgtttcccaagtgcgacgatttacaacacatatggtccaactgaagctacggtagcagttacaagtattcaaattacacaagaaatcttagatcaatatccgacattacctgttggcgttgaaagaccaggcgcaagattatctactacagatgaaggtgaacttgttatcgaaggtcaaagtgtaagtttaggatacttaaaaaatgaccaaaaaacagctgaagtatttaatttcgatgacggtattcgtacatatcacactggtgataaagcgaagtttgaaaatggtcaatggttcattcaaggtcgtattgatttccaaatcaaattgaatggctacagaatggaattagaagaaattgaaacacaattacgccagtctgagttcgtaaaagaagcgattgttgtacctgtatataaaaatgataaagttattcatttaattggtgcaattgtgccaacgactgaagttacggacaatgcagaaatgactaaaaatattaaaaatgacttgaaatcacgcttaccagagtatatgattcctagaaagtttgaatggatggaacaattgccattgacttcaaatggtaaaattgacagaaagaaaattgcagaggtaattaacggatgattccatatggtgattttacattcttcttaattgctttaattgcattattaccagtcattatacttggatttttaggtaagcgaagttacatttataatggcgtagttacagcatttatgattgtgttaatcttttcttctgataaacataatctgtttgaccaaaagtatttaagtgttcaattaattagttttattatttacgtcgtatggcaagttttattgataatgttttattatcattcaaaaccaaaaaataattcattttcaaaatttgtaactgtaatggttttatcaatattgccattagcacttgtgaaagtgttacaaagtacatggttaggtggacatcagattcacttccatgaaagtaaattaattgaatttgttggtttcttaggaatttcttatgttacattcaaaagtgtgcagttaattatggaaattcgtgatggttctatcaaagaaattaaagtatggaaattaattcaatttatttcattcttcccaacgatttcatctggaccaatcgatcgttacaaacgtttcgttaaagacgataaaaaagtaccaacaggcaatgaatatcgtgaattagtattaaaagcaattcacatgattatgcttggtttcttgtataaatatattgttgcttactttattaacacatatgcaatcatgccgttacaattagacttacatggctttgtcaatttgtggttatatatgtacgcatacagcttatatttattctttgactttgcaggttatagtttatttgcgatagcatttagttatttattcggtattaaaacaccaccaaacttcgataaacctttcaaagcgaaaaatattaaagatttctggaatagatggcatatgacattatcattctggttcagagattgtatttacatgagatctttattctacatgtctcgtaaaaaattattgaagagtcaatttgcaatgtctaacgtggcattcttaatcaacttcttcataatgggaatttggcatggtatcgaagtgtattacattgtttatggtttataccatgcagcattgtttataggttatggctattatgaacgttggcgtaagaaacatccgccacgttggcaaaatggtttcacaacagcacttagcattgtgattacattccactttgtaacatttggctttttaatcttctcaggtaaacttatataataaaggagaatttaattatggaatttagagaacaagtattaaatttattagcagaagtagcagaaaatgatattgtaaaagaaaatccagacgtagaaatttttgaagaaggtattattgattctttccaaacagttggattattattagagattcaaaataaacttgatatcgaagtatctattatggactttgatagagatgagtgggcaacaccaaataaaatcgttgaagcattagaagagttacgatgaaattaaaaccttttttacccattttaattagtggagcggtattcattgtctttctattattacctgctagttggtttacaggattagtaaatgaaaagactgtagaagataatagaacttcattgacagatcaagtactaaaaggcacactcattcaagataagttatacgaatcaaacaagtattatcctatatacggctctagtgaattaggtaaagatgacccatttaatcctgcaattgcattaaataagcataacgccaacaaaaaagcattcttattaggtgctggtggttctacagacttaattaacgcagttgaacttgcatcacagtatgataaattaaaaggtaagaaattaacatttattatttcaccacaatggtttacaaaccatggtttaacgaatcaaaactttgatgctcgtatgtctcaaactcaaattaatcaaatgttccagcagaaaaacatgtctactgaattaaaacgtcgttatgcacaacgtttattacagtttccacatgtacacaataaagaatacttgaaatcttatgctaaaaaccctaaagaaactaaagatagttatatttctggttttaaagagaatcaattgattaaaatagaagcgattaaatcattgtttgcaatggataaatctccattagaacatgttaaacctgctacaaaaccagacgcttcttgggatgagatgaaacaaaaagcagttgaaattggtaaagctgatactacatcgaataaatttggtattagagatcaatactggaaattaattcaagaaagtaagcgtaaagttagacgtgactacgaattcaatgttaattctccagaattccaagatttagaattacttgtaaaaacaatgcgtgctgctggtgcagatgttcaatatgtaagtattccatcaaacggtgtatggtatgaccacattggtatcgataaagaacgtcgtcaagcagtttataaaaaaatccattctactgttgtagataatggtggtaaaatttacgatatgactgataaagattatgaaaaatatgttatcagtgatgccgtacacatcggttggaaaggttgggtttatatggatgagcaaattgcgaaacatatgaaaggtgaaccacaacctgaagtagataaacctaaaaattaaaatacaaatagcacataactcaacgattttgattgagcgtatgtgctatttttatattttaaatttcatagaatagaatagtaatatgtgcttggatatgtggcaataataaaataattaatcagataaatagtataaaataactttcccatcagtccaatttgacagcgaaaaaagacaggtaataactgattataaataattcagtattcctgtctttgttgttattcataatatgttctgttaacttaatatctttatattagaatacttgttctacttctattacaccaggcacttcttcgtgtaatgcacgctcaataccagctttaagagtgattgtagaacttgggcatgtaccacatgcaccatgtaattgtaatttaacaataccgtcttccacgtcaatcaatgagcagtcgccaccatcacgtaataaaaatggacgaagacgttcaataacttctgctacttgatcaaacatcgttgtatcttcagtaggcatcaggcaagtctcctttcgagagatgaatttgataatctttattagtatattataatagatagtgtaataaaaatctatcaaaccaatgggggataaatatatggagcacgtgagtgtggtagtttatggggcagatgttatatgtgcaagttgcgttaatgcgccaacatcgaaagatatttatgactggctacagccgctattaaaaagaaaatacccaaatatatcatttaaatatacgtatatagatattacaaaagataatgacaacttaacagatcatgatttacaatttattgaaagaatagaacaagatgaactattttatccattaattacaatgaacgatgaatatgtagcagatggttatatacaaacaaagcaaatcactcgatttatagaccaaaagcttgtgaatgaataatatacacataactaaaagcaatgtcagtaatagtgtgaactgacattgctttttaattttaaccattgtgatatttatataaccaaagtacgccggattttaaaatagaagcgagtcgtcctgttacagtgcggtccatgatatatgcaaaaccttgcttatctcctaatgacccaacgataccttgtacctttagttccggcattttgtcaggtaatggttcatttagccattgctttttaagcacatcggcaatttgatcaccttgaacttcggctaactgagcacttggcgcatgtggtaaatcagcacaatcaccaactacatagacgttacgatatgttggtacttgatgatactggttaactatcacgcgtccattactatttatatcaatcggcaagttacgaacaacttcaacaggttgaattcctgctgtccatacaactaaatcaatatctttaggttcatcacagttatatattttaccaggttcaactttattaatatttgaatttggaacaacggtaacattatttttggcgaaccatttcgcaacatacttacttaatttttctggaaaatttcttaaaattcgcggcccacggtcataaagatatatttccaagtctgatctactttctcttaattcgctggcaagttctatgccgcttaatccagcaccaacgataccgactttagcaccttctggtagttcactaatactatggaaagtatcccgagcctttgagagtgtttgaatactatgtgtatattcttcggctcctggaacgttatgatatttatcttcacatcctaaaccaatgattagctcatcataatcaattttagaattaccgactgagacaatttgagcatctaaatctatgtcgttaatttcaccataaactgtattcacttgtggatgattagggaatttcatacgaacatctttatctgatttcgtgcccgcagctaaagcataaaattctggtttcaatccatgaaatggcatacgatcaactaatgtgactgtataatcttgtggtaaagaagtagttaaaatgcgtgacatgatacgcatattaccatatccgccgcctaacaaaactaagtttttcataatgaagtaccccttttatatgttaatatttactttaattttgaaaagatcaaagtgcatagatatatttgttaatgaacagttataaaatgcaagtgtctttgattcatcaataacccctaaaaaagtaaatatgtatttatatgcttattatatatttttttgaaaatgactacaaataaatatttgtactaactaaggcactattacataactgggataagaaacatcagttgttgctaattgagcacatcatgttaaaataccagttttaaaatgctataatattgtaacaaatgaaataagaaggtgaagtatgaatccgatcgtagaattttgtctctctaacatggcaaaaggtggagattatgtttttaatcaactggaaaatgacccagatgtcgatgtgttagagtatggttgcctgacacattgtggtatatgttcagccgggttgtatgctttagtaaatggtgatattgttgaaggtgattcgccggaagaattattacaaaatatatatgcacatataaaagaaacttggattttttaaggaggagttatcatgccaacagttatattaacagaagcagctgcttacgaagtaaaagatatgcttaaagcaaatgaaatgccagatggctatttaaaaattaaagtgaatggtggcgggtgcactggtttaacatacggtatgggtgcagaagaagcgcctggtgaaaatgatgaagtcttagaatactttggattaaaagtattagtagacaaaaaagatgcacccgtattaaatggtacgactattgattttaagcaatcattaatgggtggcggtttccaaatcgacaatcctaatgcaattgcttcatgtggctgtggtagttcatttagaactgcaaaagttgcaggtaatcctgaaaattgctaataaaataactttttaatggttaacccaatttttgggatacaaattgatatcaataacgattaaggacatatttgattatgtcctatttttgcgtaaagatattttgttttattaaaaagcttattaaaaattaagaatctgactataaatagtattttaaatgatcgtgatagcggatacatttttaatcgaaatcaggctacgaaaaaattaattaattttttcacaatctgactgaatcttgcttgaaaatataacataaaagctatagaattagtattggattaaaaatgtcttttttgtgaacatcacaggtttttacataatttaaaagacttaaataacaaaatgatgataaactagtatacattgtggtaaaagtagtaatgaccagttgttactagtaattatcagcatttggttaaaaaaatatgaaagcttaggtgaaattaaatggctcaagatcgtaaaaaagtacttgtacttggtgctggttatgcaggtttacaaactgtaactaaattgcaaaaagcgatatcaacagaagaagcagaaattacgcttattaataaaaatgaatatcactatgaagcaacatggttacatgaagcatcagcaggtacactaaactatgaagatgtattatatcctgtggaaagtgtcttgaagaaagacaaagtgaactttgttcaagcagaagtaacaaaaattgaccgtgatgctaaaaaggtagaaacaaatcaaggtatttatgactttgatattttagtagtagcattaggtttcgttagtgaaacattcggcatcgaaggtatgaaagatcatgctttccaaattgaaaatgttatcacagcacgtgaattatcacgtcatatcgaagacaaatttgctaactatgcagcatcaaaagaaaaagatgataacgatttatctatcttagttggtggtgctggattcactggtgttgaattcttaggtgaattaacagacagaattcctgaattatgtagcaaatatggtgtggatcaaaataaagttaaaatcacttgtgttgaagcagcacctaaaatgttaccaatgttctcagaagaattagttaaccacgcagttagctacttagaagaccgcggtgttgaatttaaaattgctacaccaatcgttgcttgtaacgaaaaaggttttgtagttgaagtagatggtgaaaaacaacaattaaatgcaggtacttcagtatgggcagctggtgtacgtggtagtaaattaatggaagaatcatttgaaggcgttaaacgtggacgtatcgttacaaagcaagatttaacaatcaatggttacgacaacatttttgttattggtgactgttcagcgtttatcccagctggagaagaacgtccattaccaactacagcacaaattgcaatgcaacaaggtgaaagtgttgctaaaaacattaaacgcatcttaaacggtgaatcaactgaagaattcgaatacgttgatcgtggaactgtttgttctttaggttcacatgacggtgtaggtatggtatttggtaaacctatcgctggtaaaaaagcagcattcatgaaaaaagtgattgatacacgtgcggtattcaaaatcggtggtatcggtttagcattcaaaaaaggtaaattctaggctttaaataaagtttcagctaaacacataaaattaaattattcatttataaagtccttcagtgtcactgaagggctttattgttgtacaatttgaagtgagtaacatatcaaatctaaggaggtacattatgaattttaaattaaataacacactaagcaacgaaataaatacattgattattggtataccagaacatttaaatcagttagagcgcattagttttaatcatatcgatattacagaatcacttgaaagactaaaacatcaacatattattggtagtaaagttgggaagatttatacaactgcatttgatgtacaagatcaaacatatcgtttaattacagttggtttaggaaacttaaagacacgtagttatcaagatatgttgaaaatatggggacatcttttccaatacataaagtcagaacacattgaagatacgtatttacttatggattcatttatttcaaaatatgatcagttatcagatgtattaatggcatgcggtattcaaagtgagcgtgcaacatatgaattcgatcattataaatcaagtaagaaggcaccgtttaagacgaatttaaaccttattagtgaatcattaattgaattagattttattcatgagggtatcagtattggccaatccattaatttggcaagagactttagtaatatgccaccgaatgtattaacaccacaaacatttgcagaagatattgttaatcattttaaaaatacaaaggtcaaagtagatgttaaagattatgacactttagtttctgaaggattcggacttttacaagcagtaggtaaaggtagtaagcataaaccgagattagtaaccatcacatataatggcaaagacaaagatgaagcaccaattgccttagttggtaaaggtataacgtatgattctggtggttatagtattaaaacgaagaatggcatggctacaatgaagtttgacatgtgtggcgctgcgaatgtcgttggtatcattgaagcggctagtcgtttacaactgcctgtaaatattgtcggagtgcttgcgtgtgctgaaaatatgataaatgaagcatcaatgaagccagatgatgtatttacagcattaagtggtgaaactgtagaagtaatgaatacagacgctgaaggtagattagtccttgcagatgctgtgttttatgcaaatcaatatcagcctagtgtgattatggactttgctacattaacgggtgcagcaattgttgcactaggcgatgataaagctgctgcatttgaatcgaatagtaaagtgatattaaacgatatattacaaataagttctgaagtcgatgaaatggtatttgaattaccgattactgcaaccgaacgtgcaagtattaaacacagtgatatcgctgatttagttaaccatacgaatggacaaggtaaagcgctatttgcggcaagttttgtaacacattttagtggtcaaacacctcacattcatttcgatattgcaggtccagcaacgactaataaagcttcatataatggtccaaaagggccaacaggatttatgattccgacgatagtacaatggttaaaacaacaataatttaattatttgcctgatacaacttgtgtcttgatatacatttctaatttaactcttgaaagtataaaggatcgcattgtatcaggcattttcattgttgtaagaaaatataaatcgcatatccttgtgagcataaatcaacttgactagcattgcaaaaaaatattataagcatatgttcattcagtcaacgactactaatattgcattttagaacttaggattttgattggtgttccaagcttgtaaaattgtttaatttaatgaaagctaaaattattttaagaaagacaattaactaaaaaataaagattattggtatagtttgctattgacaggtgttaaagctactgatactatgtagtctataaacgctttagttcgatagagtgataaaggatggttgtcatatgataaatgcagtagtaatagcagtaattttaatgattgtgctatgtttatgtcgattaaacgtagttataagcttatttatcagtgcgctagttggtggcttaatttcaggcatgagcattgaaaaagttataaatgtatttgggaaaaatatagtcgatggtgctgaggtagcattaagctatgctttattaggtggatttgcagcattaatttcatacagtggtatcacagactatttagtaggaaaaattataaatgcaattcacgctgaaaatagtcgatggtcaagagttaaagtcaaagtgacaataatcattgcattattagctatgagtatcatgagtcaaaacttaattcctgtacatattgcattcattccaattgtcatcccaccattgttaagtctgtttaatgacttaaaaatagatagacgtttaatcggtttgattatcggttttggtttatgtttcccgtatgtgttattaccatatggattcggtcaaattttccagcaaattattcaaagtggctttgcaaaggcaaatcacccaattgagtttaatatgatttggaaagcaatgcttattccttcaatggggtatattgttggcttacttatcggtttatatgtatatcgtaaaccacgtgaatatgaaacacgtaaaatttcagatagtgacaatgttacagagttaaaaccatatatcttaatagtaacaattgtagcaatactagctacatttttagtacaaacatttacagattcaatgatttttggtgcactggcaggggtactcgtattctttatttcacgtgcatataattggtatgaattagatgctaagtttgttgaaggtattaaaattatggcttatattggtgtagttattttaacagcaaatggatttgctggtgtaatgaatgctactggtgatatagatgaattagttaaaactttaacaagtattactggtgataataaattatttagcattatcatgatgtatgtgataggtttaattgtcactttaggtattggatcatcatttgcaacaattcctattatcgcatcattattcattccttttggagcgtcaattggactagatacaatggcattaatcgcattgattggaacagcgagtgcattaggtgactcaggttcgcctgcaagtgattcaacattaggaccaactgcgggattaaatgttgatggccaacatgatcatatacgtgatacatgtgtaccaaacttcttgttttataatattcctttaatgattttcggtactattgctgctatggtactataagcataaagaggtgaaaatatgactcatttattagagacatttgagatgtcaatagatcaccaggaagatggtttagttgttatttctatgcctgttactgataaagtaaaacaaccatttggatatttacatggtggggcttcgattgctttaggtgaaacagcatgttcattaggatctgctaatttaattgatacaaccaaatttattccattaggtttagagatgaatgctaaccatattcattctgctaaagatggtcgtgttactgcgacagctgaaattattcatcgaggtaagtcgacacatgtatgggatataaaaattaagaatgacaaagaacaattaattacagttatgcgtggtacagttgctattaaacctttaaaataaaagaactgctagctgaaatgttatgagatattcataactacggctagcagtttttttatgcgctatattgttgtagttttagaaatgcttgttcaatgcgttcggcagctttacggccacccataacatttctaccaaatggtcctaattctaagtctgcaaagcatcctgcgacaaatagatttggtatccattctaatttttcggaaataacagggtaattacattcgttgataggtgcatcataattttgtattaattgcttaataagtggttgtgacataaaatcttgttcaaaaccagttgcaaccataatctgttgatatggaacagaatcattttcagtgttaattacaccaccactaatttgagtgataggtgttttatgcacatttatacgaccatttttaatatgttttttaaggcgtaagtacagttcgtgaggcattgatcctttatgacgttcgcgttgtacaatggcatttctttcaggcatgcttttagtacttaaaaatgaagacatatttttcggacctaaccaaccaggatcagcatcaaagtcatgtatttcaatatctttatttagccataaatgaatctttttatcgttatcatgatttaacaatttaagtgcaagatgtgcagcagtaatgccgctaccaacgatatgatcggtcttatcatatactacttgatcaagttctttctcgaagatatgatttacattctgtttgtcttttaaaatgtcaggcataaacggaatatttgtactgcctattgcaataacgacgcaatctgtagtgataatttgtccatcttctaacttgatatgccatttgtcttcttgtttatctaaagtttgaactaaaccttgaaccaagcaatcctctaattgatattgtttagaagcatgtgcaatatgatccataaacattgtcaattcaggtcgttgataaggaccataaaaagcatttgtatattggtgctgtttagcgaattgttttagatggaacggttgtggatgtacgtgatgtacaatcggtgatcttaaataaggcatttctattcgatttgtatatgagttaaacctttggcaaaaagtttcgtgtgggtcaatgattgttaatcggtctgttgttaatccgcttgataatagtttttgtgcgattgcagttccctgtatgccaccgccgataattgtccaatgcataataaaacctctctctttttaaaacgtaatcgttacgatttataattattattatcataatacataacgacatgaaaggcaattaaattaaagagatatatgtagatagggcgaatctgtagtcaaagaaaaaatcattgaaaaagaggtaacaatgtcaaaagaaaacagcagtaaaatcattcctaatttggaatcatcttactgctgtttgttgttgatttatattcatgattttgttatataatctacaattttgtgtcttttaagtcttccgaaatttcatcgactttagtctttttagtataaggcgttttaatattatatgctgctttcataatcatatgacttgaaagaggacctgtaattaatacaaagataatcgcaacgattaattgcatatttacaaaaccttgagtagcaataaaatataaaaacgtaccaaatagtaatgacattgcacctaatgttgatgcttttccggcagcatgtgcacgtgaatatacatcttcaagtctcaataatcctatagctgctagggcgctaattaaagcaccgatgataacaaagataagtgcaagactaatcagtatgattttgatcatgttcaatcaccttacctttgtccataaatttagagaatactgcagtacctaaaaaagctaatataccaatcatcataataacgacaatcatgtatttaatatttaataaaatactgaataatgctataactgccattaattgaagaccaatcgcatctaatgcgacaacacgatcggcaagtgatgggcctagcacaacgcgaatgagcatagctaacatagaaatgacaactatgattaatgcaataacgataataacattatgattcattatatttcgcccacctctcttacaattttctctaatgatgttttaatactttctacttcttgctctttagttgaaaaatctatggcatgaatataaatttttgtacgatcgtcacttacaccaagcactacagtaccaggtgttaatgtaattaaattagacagcaagacaatttgccaatctttttttaaatctgtgtgataaacaaagaatcctggttcatttttaatcgaaggtttaataataattttcaaaacatcaaaattagctttaatcagttcgattaagaaaataataactaatttaataatacgatatagcgtgatgacataaaatctacctggtaacactctgtgtaagaggtaaacaagaactaggccaaagatgaaacctaacacaaagttatttgttgtgtaactatttgtcacaaacaaccaaaacactgcgataataaagtttaatactaattgtacagccatgttatttacctcctaatacagctttaacgtaggttgatggattgtagaatgtttctgcaccagcttttaccattggatataagtaatctgctgacaatccatataaaacagttatcacaactgcaacgattgcaatcgtagttaaatatttgacgtcgactttgttattaagatcatatccttttggttgaccgaaaaagccttgtaggaatatgcgaatgacagaatataatacgactaaacttgataataagacgatgacaccacttaaataaaatcctctttcaaatgttgattggacaataaaaaattttccataaaagccactgagtgggggaatgccagctaaacttaatgctgcgataaagaatgaccaaccaagtacaggatatcgtttaattaagccaccaaattgtcttaaatcagcagtgcctgtaattttaatcataattccgataagcaagaataatgcaagttttactaacatgtcgtgcaatgtatagtaaatagccccaatcatacctgactctgtcatcattgcaacgccgactaagatcacacctacagcaatcatgacattgtataggatgatttttttaatgttggcatatgcaacagcaccgacacaaccaaagatgatcgttaatagtgctaagaataaaatgacataatgtgaaaagcttacattatcactaaagaataggctcaatgttctagcgattgcataaacaccaacttttgttaacaaagcaccaaagaatgcaatgattggaattggtggtgcatagtatgcactaggtaaccaaacaaacattgggaatacgccagcttttgtagcaaaaacaaagataaatagtatgaaaacgatattgactaagccactgtcatgcgctgaaaggttagctaatttattgcttatatctgctagattcaatgttcctactactgaatataaaatcgctacacccattacgaagaaggatgacgatacaacgttaacaagaacatattttattgtttcttgtagttgaatttttgtagaaccaattactaataagaaataagatgacattaaaaatacttcgaaaaatacgaataggttgaaaatgtcaccagttgtgaatgcaccaatgatacctattaacataaatagtactgaaaaataataataatatctttcacgttcaataccaattgtttggtatgaatataaaatcacaatagctgtaataataatactagtaattattagtagggcactgaatatgtctaatacaaagacaatactgtatggtgctttccatgaacctagctctacgcgtattggtccatgtttaacaacatttgctaaattgataattgccgcgaccaaggttaataatgtaccgcctagtgcgacataacgctttataataggacgctttccaataaagacaagtaatatggctgtaattactgggataactagcgttaacacaagcatattactttcaatcatcttctggaactcctttcatactctcaacgttatctgtgcctaattctttatatgttctaaatgctaatactaagaaaaaggctgttgtcgcaaaggcgataacgattgctgttaaaataagtgcttgcgggataggatcaacatagctttttacgttcgcttcataaattggaacagtaccatgtttaagtccgcccatagttattaaaaataaatttgctgcatgtgttaatagtgtagttcccataacaattcgtatcagacttttagacaaaacgagatagacactaattgctgtgagaataccactaacaaaaatcataataatttccactattcgttctctccaatcgaaataataattgtcatgacagtaccaactactgcacataaaacaccgaaatcaaagaatactgctgttgtcatatgaacaggttctaatataaataacggtatatcaaatgtgacatgcgtaaagaaatttttgcctaaaaaccaacttgcgataggcgtcgcaatacaaaaaactaatccgatacctatcaagattttaaaatctaatgggaaaattttacgcattgtttctatatcaaatgcaatcgtaatgataacaagtgaacttgcgaataataatccgccgacgaaaccgccaccaggtgtataatgtcctgctaagaaaagtgaaaaaccaaagaccattaccatgaaaaagataataactgcagcaaattgcaaaattagatcattttgttgtctattcatgatttttcacctcgttaccttgcgtttgacgctttttacgtaatttaatcattgtatatacagctaatcctgcgataccaagcacagatgactcgaataaagtatccataccacggaaatcaacaagtatgacgtttaccatgtttttaccgtgagctaaatcataaacgtgctcttgataaaacttagatatcgattcaaaatgtctatttccgtatgcaattaaaccgataataatgacggacaaaccaacaccaccagcaattaaagcattagtaagctggaatgagcgcttttcattataacgatttaaatttggtaagtggtagaagcataataagaacaatgctgttgaaatagattcaacgacaaactgtgtcaatgctaagtcgggtgctttaaagaatataaacaatacagacacagcatatccaactgcacttaacataatgatgctaaataatcttgatttagcgaaaagaattaaaaaggcagcacttaataataaaattacgatacaaacttcgaaaattctaatcggactaacgtctttaaaattaatgttgaaaggtactgagaatatagtgacaaatgttaataaaattaatgcaccaaaaatgataactaaattattacgtgaataatcggtaacatagctattcgtcatcttttcagagtagtttggaataacatttgcacttctgttgtaccaataattgaatgttagtttaccaggttgtcgttgcaacaatttcacccaataactaaatgtcacaattagtaagatacctaaaatataaatcactaatgttgataaaaaggcaggcgttaatccatggaacatatggaattcaacatcatcaattaccgtatgattaatcgaagatgtagctggttcaataatcgaattagttaaaatgccagggaataaaccaaatacaattactaatgtagctaaaatagctggtgataaaagcattaatattgatacttcgtgtgcttttttaggtaattgttcaggtttatattgtccgaaaaatatatgcattataaatttaattgaatatacaaatgtgaagacactgcccactataccaatgattgggaataggtagcctaatgtatcaacactgaataaatttgcttggcttgctgtaaatgttgtttctaaaaatgattcttttgataagaaaccattgaacggtggtacaccagccatacttaatgctgtaataacagtgattgtaaatgaaataggcataattgttagtaagccacctaatttcttaacatcacgtgtaccagtagaatgatccactgcacctgtaatcataaatagggcacctttaaatgttgcatggttgattaaatggaatattgcagccgtaaatgcagcagcatatattttgctatcatcgccttgatagtgataactaatggcaccgattccaagcatcgccataatcatacctaattgggatactgttgaaaatgccagtatacctttcaagtcttgttgttttgttgcgtttagcgaagcccagaataatgtaattaaaccaacgagtgtgacagtccatacccaaccttgcgatgctgcgaagattggtgtcattcgagcgattaaatataaccctgctttaaccattgttgctgaatgaagataagcactgactggtgtaggtgcttccattgcatctggtagccaaatataaaatggaaactgagcagattttgtaaaagcaccaatcatgattaaaatcatcgcaaaaatgaagaatgggctattttgaatttcagaagcatgttgaatcatgtactgaatgctaaatgattgtgttggtatagcgagtaagatgataccacctaataatgatagaccaccaaatactgtgattatgagcgatttttgagcaccatatatagatgcttgtcgttcgcgccagaatgaaataagtaaaaaactagaaaatgacgttagctcccagaataaatatagaataataacattatctgaaagtacgacacctaacattgcacccataaatagtaataaataacaataaaaattccctagttgttctgacttacttaagtagccgattgaatataatactactaaactgccgattcctgaaataagcaaactaaagagtaaacctaagccatcaagatataaatcaaagttcataccaaaatgaggcatccaatttaaggttttcattacagtattacctgacatcgtcgttttaattaatgtaagcatataaataaatatgacgatagggacaggtaatacgaaccatcctaaatgtatacgtttaaaaaatctatacaggataggaataatgagtgcgaatattaacggtaatatcaccgcaatatgtaacaaactcactatgttgtcctcctttaaaaaatatttatgttattcattatacatgaatgatatagttctgaaaaacgtacacactccttgttgtgctttattttcagaagtatttaaataagaagaaacacgtcattttttatttaaaattttctttgtattgaagtgaataatcttcttttaagcgtgctaaactagctaaagacatttcagcatgttttgtttgctgagctttaagtttagtttctaaatctgtaattgcttgttgaagtgaatcttcatagcgcaatacatcaacattgaagtcgcgtaattgtgaacgtttcgtatagcgtttttcaaaatggcttaatgctttgcggtcatggaaaaatacaccttcagtttcagtagggttatgtaaatcaccttgtttcgggtgtttgataacttgttcaactttaacaaggacatcgtctccattttcttcaacaatcgtgacaccatagctacctgttttgtgtgaaaatcgatatagcttcatgctattttcctcccttaaaagtatgttaatatatatgtatcataacatgaatggagaatataaatggctaactatccacagttaaacaaagaagtacaacaaggtgaaatcaaagtggttatgcacacaaataaaggtgacatgacattcaaattatttccaaatattgcaccaaaaacagttgaaaattttgtgacacatgcaaaaaatggttattatgatggaatcacattccaccgtgtcattaatgacttcatgattcaaggtggcgatccaacagctactggtatgggtggcgaaagtatttatggcggtgcttttgaagatgaattttcattaaatgcatttaacttatatggcgcattatcaatggctaactcaggacctaatactaatggttcacaatttttcattgttcaaatgaaagaagtacctcaaaatatgttaagtcaacttgcagatggtggctggcctcaaccaatcgttgatgcatatggcgaaaagggtggtacaccatggttagatcaaaaacatacagtattcggtcaaatcattgatggtgaaactacattagaagatattgcaaatacaaaagtgggaccacaagataaaccacttcatgatgttgtaattgaatctattgatgttgaagaataatatctaaacataattaactaccaacattttaaactcggataaagctaatttatgaatggattagtatatattccaacgaaaataaataaactaatatgatgagcaatctcaatatatttatcaagaaagcacagtttttaaatagatgtgtattttaaagataatagttgaggttgctttttatgtttttacagagaattgctattcaaatagtaaataaattgaaaacaaagtagctggatatcatattgatttagataggaatttgttgctaattttatttgtaaatccaagtttgtagaattcttattcatttataaaataatattcgtatgatttgatgttttaattagtccaccatttcgatttgtgctatgataatagtgttaagtaaacgaaataaggggttattaagttgaataactacaaaattggccaacatatcaaggtgcgtgtaactggtattcaaccatacggtgcgtttgttgagacccctaatcatactgaaggactgattcatatatcagaaattatggatgactacgttcataatttgaagaaatttctatcagaaggccaaattgttaaagctaaaattttgtctatagatgatgaaggaaagcttaatctatcattaaaggataatgattacttcaaaaattatgagcgtaagaaggaaaaacaatcagtattagatgaaatcagagaaacagaaaaatatgggtttcaaacacttaaagaacgcttaccaatctggataaaacagtcaaagcgagcaattcgaaacgactaaaggaacagataaatcgtaccgaaaatcatacaaagggtctgaaatgaaagtttcttagactataaaagagattagtatctattaaattttattagatactaatctctttttgtctacgataacgtaatatgattgattctatttacacgtacaaatggtttaaggtgacatatccattatctttgttagatagaatcgttgatttgcaatattgtatgtggatttgtttttttatttattttagaaatgagaactacaacttaaagtattaaacgaattgcaactatataaacagataattggagaatgaaaaaattacatgttatagtcaactcaataattttaaggaggaattaagtaatgaaaagtaaatacgaaccattgtttgataaagtagaattaccaaatggagtagagttgagaaatcgatttgtgttagcccctttaacacatatttcttcaaatgatgatggtactatttcagatgtagaacttccttatattgaaaagcgttcacaagatgttggtattacaattaatgctgcgagtaatgtgagtgatgtcggaaaagcatttccaggacagccatcaatcgcgcatgacagtaatattgaaggactaaaacgattagctacagcaatgaagaaaaacggtgccaaagcactcgtacaaatacatcatggcggtgcacaagcattgcctgaattaacacctgatggagacgtcgtagcaccaagtccaatttctttaaaaagttttggtcagaaacaagaacatagtgctagagaaatgacgaatgaagagattgaacaagcaatcaaggattttggtgaagcaacgcgacgtgcaattgaagcagggtttgatggtgttgaaatacatggcgcgaatcattacttaattcatcaatttgtatcaccatactataatagaagaaatgatgtatgggcaaatcaatataaattcccggtcgctgtgattgaagaagtacttaaagcgaaagaagcgtatggcaataaagactttatagttggatacagattatctccagaggaagcggagtctccaggaatcacaatggaaattacagaggaactcgttaataaaattagccatatgccaatcgactatattcatgtttcaatgatggatacgcatgcaacgacacgtgaaggtaaatacgctggacaagaaagactgcctttaattcacaaatggataaatggtcgtatgccacttatcggtattggttcaattttcacagctgacgaagctttagatgcagttgaaaatgttggtgttgacttagtagccattggtagagagctactactggattatcaatttgttgaaaaaattaaagatggacgggaagatgaaattattaattactttgatccagagagagaagataatcatcacttaactcctaatttatggcatcaatttaatgaagggttttatccattaccacgtaaagataaataagtgtttaactgttaccactaatgatattgtgtatgcaatttgttagtggttttcaatatttataaataaaaatattcttagtaaaatatacttttgattaagtgtaaaattatcaattcttttgcttgtaatcatttaagtaattatgtcattataaatgtaagggttttcaaaatagacaaatttaatgaaacttagtgattatttcatcttttttggtggaaaagtatctgctttgaaaactaatgtaattatttggataatgtttcatgtataatagttataaatgatgaaaaggggagatatgatgactaaatctgaaaaaattattgagttaacaaatcattacggagcacataattatttaccattgccaattgtcatttcagaagctgaaggggtatgggttaaagatcctgaaggcaataaatatatggatatgttatctgcatattccgctgttaaccaaggtcatagacatccgaaaattattcaagcattaaaagatcaagctgataaagtgactttagtttcacgtgcttttcatagtgataacttaggtgaatggtacgaaaaaatttgtaaactggcaggtaaagataaagctttaccaatgaatacaggtgctgaagcagtagaaacagctttgaaagcagcacgacgctgggcatacgatgttaaaggaattgagccaaataaagcagaaatcattgcatttaatggtaacttccatggtcgaacaatggcgccagtttcattatcttcagaagcagaataccaacgtggttatggtccgttattagatggatttagaaaagttgattttggagatgtagatgcattgaaagctgcaattaatgaaaatactgcagcagttttagtagaaccaattcaaggtgaagcgggtataaatataccgccagaaggatatttgaaagcaattagagaattatgtgatgaacataatgtcttatttattgctgacgaaatccaagcaggattaggtcgttcgggtaaattatttgctacggattgggataatgtaaaacctgatgtctatattttaggtaaagcactaggtggtggagtcttcccaatttctgttgtattagcagataaagaagtattagatgtctttacacctggctcacatggttcaacatttggtggtaatccacttgcttgtgctgcatcaattgctgcattagatgttatcgttgatgaggatttaccaggccgctctttagaattaggagattattttaaagaacaattaaagcaaattgatcatccatcaattaaagaagtccgtggacgtggtttgtttataggtgtggaacttaatgaaagtgctagaccatattgtgaagctttgaaagaagaaggcttattatgtaaagaaacgcatgatactgtcattcgttttgcaccaccattaattattactaaagaagaattggaccttgcacttgaaaaaataagacatgtatttcaataatgtcaaaaagttgtaacaatcagtttgtaagggctttaaaaaggaatacgttatgttacaatatgtttgaaagcgaaatcattaggtaaagaagaggcgaaaaggatcatgactgagaacaataatttagtaacttctactcaaggaattattaaagaagcattgcataaattgggatttgacgaaggaatgtacgatttaattaaagaacctttaagaatgttacaagtgcgtatccctgtacgaatggatgatggcacagtaaaaacattcacaggttaccgtgcgcaacataatgatgctgttggaccaacaaaagggggcgtgcgtttccacccagatgttgatgaagaagaagtaaaagcattatcaatgtggatgactttgaaatgtggcattgtaaacttaccatacggtggtggtaagggtggtatcgtttgtgatccacgtcaaatgagcattcatgaagttgaacgtttatcacgcggatatgtaagagcaatttcacaattcgtaggtccgaacaaagatattccagcaccagatgtatttacaaactcacaaattatggcttggatgatggatgaatatagtgcattagataaatttaattcaccaggtttcatcacaggtaaaccaattgtattgggtggttctcatggacgcgacagatcaactgcactaggtgtagttattgcaattgaacaagctgcaaaacgtcgtaatatgcaaattgaaggtgccaaggttgttattcaaggtttcggtaatgccggaagtttcttagctaaattcttatatgatttaggtgcaaaaattgtaggtatctctgatgcttacggtgcattacacgatccaaatggcttagatatagattatttattagaccgtcgtgatagttttggtacggtaacaaatttatttgaagaaacaatctcaaataaagaattgtttgaattagattgtgacattttagtaccagcggctatttcaaaccaaattacagaagacaatgcacatgatattaaagctagtatcgttgttgaagctgctaatggacctacaacaccagaagcaacacgtattttaactgaacgtggtatattattagttccagacgtattagcaagtgctggtggtgtaacggtttcttacttcgaatgggtacaaaataatcaaggttattattggtctgaagaagaagttaatgaaaagctacgtgaaaaattagaagcggcatttgatacgatttacgaattgtctcaaaaccgaaaaatagatatgagacttgcagcatatatcataggtattaaacgtacagcagaagcagctagatatcgtggttgggcataattaattatcatatgtgatttaacgagcttgggacagaaaacaaagccctaagctcgttaattttattttagcagtagttgactgtaaaacaatgcccgtgtaacacgctcttttcaaaaatagtcggggccccaacacagaggctggtggaaagtcagcttacaatagtgtgcaagttggggtgggacgacgaaataaattttgcgaaaatatcatttctgtcccactcccaaaaagacagcagtaggataatttcaatttggaaatatcttactgctgttttttatagtaatagctatatttttgtatttatgttttctagtttaacattactacttaatgacttctttatatttatcagcgaaatttgtaaagacaccatcaacgccatatttatttaatcgtaacatatcagctttttcattcactgtataaggatgtactataaatcctaagtcttttaaatgatgggtattttgttcagttaaatctgtataatcaggacctaatccaatcgcataagagcgtatctcttttaagcgttggtcgttaaattgttgtagttcacctttatcaactaattttactaatggcacatgcttattttgacgatgaattttctttaaactttcgtcagaaaatgattgaatcattacatgtccattttttaatttattgttatttaaaaggtgatgctttttcaatgaagctaataattgttcttccattcctgggtatacatcaggtgactttgtttcaatataatagtttgcattcgggccataacgttctaaaatttcatctaaagtgggtactttagcatttttataacttgctcttgcgtattttggatattttttattaaaccaacttcctgcatctaactgttttaattcatcaagggtataatcctcaactttaccgtgtccatttgttgtacggttaacagtttcatcatgcatagcaactaaatggccatctttggtacgttgtaaatcaatttcgatataagatgcttttaactcattatgactcttatcatatgcttgaaacgtatgctcgggtgcatagccacttgcgccacgatgtgcgatagtagtgaatcgctcattcgttaaatttgtatgccattgaatagcctgaggtttatttgcaatttgatttgtttgttcagcgccagcagtaggtactgataaaaatcccatagtaaaaacagcagaagcagccataaatttagtgaagcttttcgaagagttagtcatagtctttatcctttcatctctttatttgtagtctaacaattttaaaatactacaaaaacctgcttgtgaaaacgctttacacatttcttttacaatttataacatttttgtaatataaatttaaaagaattatcaaacattttaggaatcttaaaaatgtgatgttcaacaagacgaagagagcattaaaatacccacaatgtaattttaatagacattgtgggtaggtagattaacgtatttattgtgatagtaattgtttagcaacatcaagttgttgtttgaccgatgattgacctgttgaaccgtaactttgacgtcgttttaaacaattttcaggctgcaaataatcgtaaatatcggcatcaatactagaatgatgttgttgatatgttgctaaaggaacatctaataaataatgaccttgttgtatacattctaagacgatttttcctacaatttcatgtgcagttctaaatggaatatttttagttactaaataatctgctagttccgttgcatttgaaaaatcttctttaacagtttgattgagtcgttctttattaattgtcatcgtttgaatcataccttcgaaaatacgtaaagaacctttaattgtatggacagcatcgaataaaccttctttatcttcctgcatatctttgttatatgctagaggtaatccttttaaagtcataagcatgctcattaaatgaccagtcgttcgaccaactttacctctaattaattctgccatatcaggatttttcttttgtggcataatagatgagccagttgaaaatgcatctgataatgtaatgaatttagcttcgtctgtggaccagaaaataatttcctctgcaaagcgtgataagtgaaccatcgttaaagaaatattatgcaatgtttcaataatatagtctctgtcactaacagcatctaggctattctcatagagactgccaaagttcaacaatgctgttgtctcgtgtctatcgatagggtatgtggtaccacttaaggctactgcacctaaaggattaatatcgattcgttttaaactatcttcaaatcgttgttggtctcgttgtaacatccaaaaataagtcataatatgatgtgcaaatgaaattggctgtgcacgctgtaaatgagtataaccaggcataattgtatcaacattattggaagcgatgtctacaattacactttgtaacgacttaattaatgcgatgatatcttgcacttgtttcttagtgtacaagtgcatgtctgttgcaacttgatcgtttctactgcgtccagtatgcaacttaccaccagcatcaccgatacgtttaattaattcatgttcaatatttaaatgaatatcttctaatgatgcactaaattgaatttgatcttgatgataatcatgttgaatagattttagtccttgtataatttgttcgctgtcttgttgactaataatgccttgattcgcaagcatagttgcatgtgcaatgctgccttcgatatcttgatctatgagcgtttgatcaaaagtaatggatgcgttaaagtcgtcaacccactcttcaggttgtacttcaaatctaccgccccaagctttattgctcattgctatagcctccatgcaacatcgcatttacttgagtaggtaaaccatagatatcgataaagccaacagcagcgtcttgattaaatgcatcttcttttgtataagttgctaatttttcatcatataatgtgtaaggtgattttctaccattcacgatggcattacctttgaataatttaattctgacatcaccacttacgtattgctgagtactatcaataaataatttcaagctatcagttaaaggtgagaaccaaagtccattgtatagttgttcagcaaattgcttctcaatgattggtttaaagtgtgcgacatctttcgttaacgtaatcgtttctaatgctttatgcgcttttaaaataacttctgcagcaggtgcctcataaatttctcttgatttgatacctacaagtctattttctacatggtcaattcttccgataccatgcttaccagctaatgcattcaacgttaaaattaaatcgtctaattcatatgttttgccatcaatttgaactgggatgcctttatcaaacgttaaaatgatttcatcagcagtatctggtgtttcttctaaagcatttgttagatcgaacgcatcctctggtggcgcagcataaggatcttctaaaataccacattcattcgctctgccccatagattttgatcgatagaataaggtgaatcatggttgattgatacagggatattatgtttaattgcataatcgatttcttcttcacgactccatgcccactcacgtacaggtgcgaatgctttcaatgatgggtttaatgctttaatggcaacttcgaaacgtacttggtcattccctttaccagtacaaccatgtgcaatacctactgaatttgttttctcagcaatctctactaattttttagcgattaatggtcttgataaagctgaaactaatggatatgcattttcatacattaaatttcctttgattgcataacttacatactcatcactaaattcttttgttgcatcaataatatgacattcaactgctcccatatctaaagcttttttataaacgatgtctaaatctttaccttcaccaacatctaggcaacaagctacaacgtcgtatcctttgtcgataagccattgaacggccacacttgtatctagtcctcctgaatatgctaaaacaattttctctttcataaaattcacctcattgtagttatctgaatatttcgtatgaacacatgatagcaaacttttaatgaaaataaaaccattattttacatatttattcataaaatgcgatagagatagttagagttgtaagtgtaaatgcttatttatcaatgtttaaaagtattttaaaaaacatgcaaattgtataaaaaatgtttgagtgtttgacgccagtttgaaatgtttgttgaaaaataggtgtgaaacgtcacataaatatcaattttattgattaagtacaaacttgtgaattgaatcgcaaacgtaaacttagtaaaattaagatattaaatgaaacaggaggcttttatagatgactcatattcaattaaattttagtaaaacgttagaatttttcggtgaacacgaattaaaacaacaacaagaaattgttaaatcaattcacaaaacaattcatgaaggtactggtgcaggtagtgacttcttaggctgggttgatttaccagttgattacgacaaagaagaattttcaagaattgttgaagcatcaaaacgcattaaagaaaattctgatgttttagtagtcatcggtattggtggttcttacttaggtgcacgtgcagcaatcgaaatgttaacgtcatcatttagaaacagcaatgaataccctgaaattgtatttgttggtaatcacttatcatcaacatatacgaaagagttagttgattatttagcagacaaagatttctctgtaaacgttatttctaaatctggtacaactacagaaccagcagttgcatttagattgttcaaacaattagttgaagaaagatacggtaaagaagaagcacaaaaacgtatatttgcaacaacggataaagaaaaaggtgctttaaaacagttggctacaaacgaaggttatgaaacgtttatcgtacctgatgatgtaggtggaagatattctgttttaacagcagtaggattattaccaattgcaacagctggaattaacatcgaagctatgatgattggtgctgcaaaagcacgtgaagaattatcttcagataaattagaagaaaacattgcataccaatatgcgacaattcgaaacattttatatgcaaaaggttatacaacagaaatgttgattaactatgaaccatctatgcaatactttaatgaatggtggaaacaattatttggtgaatcagaaggtaaagacttcaaaggtatctatccttcaagtgccaactacacaactgatttacattctttaggtcaatatgtacaagaaggccgtcgcttcttattcgaaacagttgtaaaagtaaatcatcctaaatatgatattactattgaaaaagatagtgatgatctagacggattaaattatttagctggtaaaacaatcgacgaagttaacacaaaagcattcgaaggtacattattagcgcatactgatggtggtgttcctaacatggtagtgaacattccacaattagatgaagaaactttcggttacgtcgtatacttcttcgaacttgcttgtgcaatgagtggataccaattaggcgtaaatccatttaaccaacctggtgtagaagcatataaacaaaacatgttcgcattattaggtaaacctggttttgaagacttgaaaaaagaattagaagaacgtttataaaatacattacttcaaagattagtgaagtttgaaaagatagaactagacgttaactatttaaagcatattttcgaggttgtcattacaaatgtaaaaatgtaatgacaacctcgtttttatttatatgcaagaactaggttactagctaatgtgacaagatgttaagagaaaattaaagataaaataatatctgccttacaataatattgttatactactagagactgatttattagcatgattacatgttaatgtttctttacttagtaattaactttataatgtaagaataattatcttcaaccaaagaaagggattgatgatttgtcgtttcatcaagtagaagaatggtttgagatatttcgacagtttggttatttacctggatttatattgttatatattagagctataattccagtatttcctttagcactctatattttaattaacattcaagcttatggacctattttaggtatattgattagttggcttggattaatttctggaacatttacagtctatttgatctgtaaacgattggtgaacactgagaggatgcagcgaattaaacaacgtactgctgttcaacgcttgattagttttattgatcgccaaggattaatcccattgtttattttactttgttttccttttacgccaaatacattaataaattttgtagcgagtctatctcatattagacctaaatattatttcattgttttggcatcatcaaagttagtttcaacaattattttaggttatttaggtaaggaaattactacaattttaacgcatcctttaagagggatattaatgttagttgtgttggttgtattttggattgttggaaaaaagttagaacagcattttatgggatcgaaaaaggagtgacatcgtgaaaaaagttgtaaaatatttgatttcattgatacttgctattatcattgtactgttcgtacaaacttttgtaatagttggtcatgtcattccgaataatgatatgtcaccaacccttaacaaaggggatcgtgttattgtaaataaaattaaagttacatttaatcaattgaataatggtgatatcattacatataggcgtggtaacgagatatatactagtcgaattattgccaaacctggtcaatcaatggcgtttcgtcagggacaattataccgtgatgaccgaccggttgacgcatcttatgccaagaacagaaaaattaaagattttagtttgcgcaattttaaagaattagatggtgatattattccgccaaacaattttgttgtgctaaatgatcaagataataacaagcacgattcaagacaatttggtttaatcgataaaaaggatattattggtaatgttagtttacgatactatcctttttcaaaatggactgttcagttcaaatcttaaaaagaggtgtcaaaattgaaaaaagaaatattggaatggattatttcaattgcagtcgcttttgtcattttatttatagtaggtaaatttattgttacgccatatacaattaaaggtgaatcaatggatccaactttgaaagatggcgagcgagtagctgtaaacattgttggatataaaacaggtggtttggaaaaaggtaatgtagttgtcttccatgcaaacaaaaatgatgactatgttaaacgtgtcatcggtgttcctggtgataaagtagaatacaaaaatgatacattatatgtcaatggtaaaaaacaagatgaaccatatttaaactacaatttaaaacataaacaaggtgattacattactgggactttccaagttaaagatttaccgaatgcgaatcctaaatcaaatgtcattccaaaaggtaaatatttagtgcttggagataatcgtgaagtaagtaaagatagccgtgcgtttggcctcattgatgaagaccaaattgttggtaaagtttcatttaggttctggccatttagtgaatttaaacataatttcaatcctgaaaatactaaaaattaatatgaaacaaatacaacatcgtttgtcggttttaatactgataaacgatgttttattttgttagtaccacaataaaagctaagttcgaaatgaacttataataaatcaatcacaatcactttgtgttaaaatatgtgtcaaaggaagtgagggtttgtcatgacattacatgcttatttaggtagagcgggaacaggtaagtctacgaaaatgttgaccgaaataaaacaaaaaatgaaagcagatccgcttggagatccaatcattttaattgcgccaactcaaagtacatttcaattagaacaagcctttgtcaatgatccggaattaaatggtagtttaagaacagaagtgttgcattttgaacgattaagtcatcgtattttccaagaagttggtagttatagcgaacaaaagttatctaaagctgcaacggaaatgatgatttataacattgttcaagaacaacaaaagtatttaaaactttatcaatcacaagcaaaatattatgggtttagtgaaaaattaacagaacaaattcaagattttaaaaaatatgcagtaacgcctgaacatttagaacactttattgctgataaaaatatgcaaactcgaactaaaaataagttagaggatattgctttaatataccgtgagttcgaacaacgcattcaaaacgagtttattacgggtgaggattcattacaatattttattgattgtatgccgaaatcagagtggctaaaacgtgctgatatatatattgatggttttcacaacttttcaacgattgagtatttaataatcaaaggattaattaaatatgcgaagagtgtcacaattatattgacgacagatggtaaccacgatcaatttagtttatttagaaaaccatcggaagtgttacgacatattgaagaaatagcaaatgaactcaatatttctattgaacgtcaatatttcaaccaattatatcgcttcaataatcaagatttaaagcatcttgaacaagaatttgatgcacttcaaatcaatcgagtggcatgtcaaggtcatatcaatattttagaatctgcgactatgagagaggaaataaatgaaattgcgcgacgtatcatcgttgatattcgtgataagcaattacgatatcaagatattgctattttatatcgtgatgaatcttatgcttatttatttgattccatattaccgctttataatattccttataatattgatacaaagcgttcgatgacacatcatccggtcatggaaatgattcgttcattgattgaagttattcaatctaattggcaagtgaatccaatgctacgcttattgaagactgatgtgttaacggcatcatatctaaaaagtgcatacttagttgatttacttgaaaattttgtacttgaacgtggtatatacggtaaacgttggttagatgatgagctatttaatgtcgaacattttagcaaaatggggcgtaaagcgcataaactgaccgaagatgaacgtaacacatttgaacaagtcgttaagttaaagaaagatgtcattgataaaattttacattttgaaaagcaaatgtcacaagcggaaactgtaaaagattttgcaactgctttttatgaaagtatggaatatttcgaactgccaaatcaattgatgacagagcgagatgaacttgatttaaatggtaatcatgaaaaggcggaggaaattgatcaaatatggaatggcttaattcaaatccttgatgacttagttctagtatttggagatgaaccaatgtcgatggaacgtttcttagaagtatttgatattggtttagaacaattagaatttgttatgattccgcaaacattggaccaagtaagtattggtacgatggatttggctaaagtcgataataagcaacatgtttacttagtaggtatgaatgatggaacgatgccacaaccagtaactgcgtcaagcttgattacagatgaagaaaagaaatactttgaacagcaggctaatgtcgagttaagtccaacatcagatattttacagatggatgaagcatttgtttgttatgttgctatgactagagctaagggagatgttacattttcttacagtctaatgggatcaagtggtgatgataaggagatcagcccatttttaaatcaaattcaatcattgttcaaccaattggaaattactaacattcctcaataccatgaagttaacccattgtcactaatgcaacatgctaagcaaaccaaaattacattatttgaagcattgcgtgcttggttatatgatgaaattgtggctgatagttggttagatgcttatcaagtaattagagatagcgatcatttaaatcaaggtttagattatttaatgtcagcattaacgtttgacaatgaaactgtaaaattaggtgaaacgttgtctaaagatttatatggtaaggaaatcaatgccagtgtatcccgttttgaaggttatcaacaatgcccatttaaacactatgcgtcacatggtctgaaactaaatgagcgaacgaagtatgaacttcaaaactttgatttaggtgatattttccattctgttttaaaatatatatctgaacgtattaatggcgattttaaacaattagacctgaaaaaaataagacaattaacgaatgaagcattggaagaaattttacctaaagttcagtttaatttattaaattcttcagcttactatcgttatttatcaagacgcattggcgctattgtagaaacaacactaagcgcattaaaatatcaaggcacgtattcaaagtttatgccaaaacattttgagacaagttttagaaggaaaccaagaacaaatgacgaattaattgcacaaacattaacgacaactcaaggtattccaattaatattagagggcaaattgaccgtatcgatacgtatacaaagaatgatacaagttttgttaatatcattgactataaatcctctgaaggtagtgcgacacttgatttaacgaaagtatattatggtatgcaaatgcaaatgatgacatacatggatatcgttttacaaaataaacaacgccttggattaacagatattgtgaaaccaggtggattattatacttccatgtacatgaacctagaattaaatttaaatcatggtctgatattgatgaagataaactagaacaagatttaattaaaaagtttaagttgagtggtttagttaatgcagaccaaactgttattgatgcattggatattcgtttagaacctaaattcacttcagatattgtaccagttggtttgaataaagatggctctttgagtaaacgaggcagccaagtggcagatgaagcaacgatttataaattcatccaacataacaaagagaattttatagaaacagcttcaaatattatggatggacatactgaagttgcaccattaaagtacaaacaaaaattgccatgtgctttttgtagttatcaatcggtatgtcatgtagatggcatgattgatagtaagcgatatcgaactgtagatgaaacaataaatccaattgaagcaattcaaaatattaacattaatgatgaatttgggggtgagcaatagatgacaattccagagaaaccacaaggcgtgatttggactgacgcgcaatggcaaagtatttacgcaactggacaagatgtacttgttgcagccgcggcaggttcaggtaaaacagctgtactagttgagcgtattatccaaaagattttacgtgatggcattgatgtcgatcgacttttagtcgtaacgtttacaaacttaagcgcacgtgaaatgaagcatcgtgtagaccaacgtattcaagaggcatcgattgctgatcctgcaaatgcacacttgaaaaaccaacgcatcaaaattcatcaagcacaaatatctacactccatagtttttgcttgaaattaattcaacagcattatgatgtattaaatattgacccgaactttagaacaagcagtgaagctgaaaatattttattattagaacaaacgatagatgaggtcatagaacaacattacgatatccttgatcctgcttttattgaattaacagagcaattgtcttcagatagaagtgatgatcagtttcgaatgattattaaacaattgtatttctttagcgttgcaaatccaaatcctacaaattggttggatcaattggtgacaccatacgaagaagaagcacaacaagcgcaacttattcaactactaacagacttatctaaagtatttatcacagctgcttatgatgctttaaataaggcgtatgatttgtttagtatgatggatagcgtcgataaacatttagctgttatagaagatgaacgacgtttaatggggcgtgttttagaaggtggctttattgatataccttatttaactggtcacgaatttggcgcgcgtttgcctaatgtaacagcgaaaattaaagaagcaaatgaaatgatggtcgatgccttagaagatgctaaacttcagtataaaaaatataaatcattaattgataaagtgaagagtgattacttttcaagagaagctgatgatttgaaagctgatatgcaacaattggcgccacgagtaaagtaccttgcgcgtattgtgaaagatgttatgtcagaattcaatcgaaaaaagcgtagcaaaaatattttggatttttctgattatgaacattttgcattacaaattttaactaatgaggatggttcgccttcagaaattgccgaatcataccgtcaacacttccaagaaatattggtcgatgagtatcaagatacgaaccgagttcaagagaaaatactatcttgcatcaaaacgggtgatgaacataatggtaatttatttatggttggagatgttaagcaatccatttataaatttagacaagctgatccaagtttatttattgaaaagtatcaacgctttactatagatggagatggcactggacgtcgaattgatttgtcgcaaaacttccgttctcgaaaagaagtactgtcaacgactaactatatattcaaacatatgatggatgaacaagtcggtgaagtaaaatatgatgaagcggcacagttgtattatggtgcaccatatgatgaatcggaccatccagtaaacttaaaagtccttgttgaagcggatcaagaacatagtgatttaactggtagtgaacaagaagcgcattttatagtagaacaagttaaagatatcttagaacatcaaaaagtttatgatatgaaaacaggaagctatagaagtgcgacatacaaggatatcgttattctagaacgcagctttggacaagctcgcaatttacaacaagcctttaaaaatgaagatattccattccatgtgaatagtcgtgaaggttactttgaacaaacagaagtccgcttagtattatcatttttaagagcgatagataatccattacaagatatttatttagttgggttaatgcgctccgttatatatcagttcaaagaagacgaattagctcaaattagaatattgagtccaaatgatgactacttctatcaatcgattgtaaattacattaatgacgaagcagcagatgcaattttagttgataaattaaaaatgtttttatcagatattcaaagttaccaacaatatagtaaagatcatccggtgtatcagttaattgataaattttataatgatcattatgttattcaatactttagtggacttattggtggacgtggacgacgtgcaaatctttatggtttatttaataaagctatcgagtttgagaattcaagttttagaggtttatatcaatttattcgttttatcgatgaattgattgaaagaggcaaagattttggtgaggaaaatgtagttggtccaaacgataatgtcgttagaatgatgacaattcatagtagtaaaggtctagagtttccatttgtcatttattctggattgtcaaaagattttaataaacgtgatttgaaacaaccagttattttaaatcagcaatttggtctcggaatggattattttgatgtggataaagaaatggcatttccatctttagcttcggttgcatatagagctgttgccgaaaaagaacttgtgtcagaagaaatgcgattagtctatgtagcattaacaagagcgaaagaacaactttatttaattggtagagtgaaaaatgataaatcattactagaactagagcaattgtctatttctggtgagcacattgctgtcaatgaacgattaacttcaccaaatccgttccatcttatttatagtattttatctaaacatcaatctgcgtcaattccagatgatttaaaatttgaaaaagatatagcacaaattgaagatagtagtcgtccgaatgtaaatatttcaattgtgtactttgaagatgtgtctacagaaaccattttagataatgatgaatatcgttcggttaatcaattagaaactatgcaaaatggtaatgaagatgttaaagcacaaattaaacaccaacttgattatcgatatccatatgtaaatgatactaaaaagccctcaaaacaatctgtttctgaattgaaaagacaatatgaaacagaagaaagtggcacaagttacgaacgagtaaggcaatatcgtatcggtttttcaacgtatgaacgacctaaatttctaagtgaacaaggtaaacgaaaagcgaatgaaattggtacgttaatgcatacagtgatgcaacatttaccattcaaaaaagaacgcatatctgaagttgagttacatcagtatatcgatggattaatcgataaacatattatcgaagcagatgcgaaaaaagatatccgtatggatgaaataatgacatttatcaatagtgagttatattcgattattgctgaagcagagcaagtttatcgtgaattaccgtttgtagttaaccaagcattagttgaccaattgccacaaggagacgaagacgtctcaattattcaaggtatgattgacttaatctttgttaaagatggtgtgcattattttgtagactataaaaccgatgcatttaatcgtcgccgtgggatgacagatgaagaaattggtacacaattaaaaaataaatataagatacagatgaaatattatcaaaatacgcttcaaacgattcttaataaagaagttaaaggttatttatacttcttcaaatttggtacattgcaactatagtattttgattttcaaaagaataaaaaataatttcgattaagtgcaaagtccttgtagcagaatgaacacaactcattttcaaaattgtcttacttatttatttgttatttgataacgaaaaaagttataatgtgaattaagataaagatgaggagttgagaatgaatgaaattcttatcattcaagtataatgacaaaacttcatatggcgttaaagtaaaacgcgaagatgctgtatgggatttaacacaagtatttgctgactttgcagaaggagatttccatcctaaaacattgttagctggtttacaacaaaatcatactttagattttcaagaacaagtacgtaaagcagttgtagcagcagaagatagcggcaaagctgaagactataaaatttcatttaatgacattgaatttttaccaccagtaacacctccgaataatgtgattgcttttggtagaaattacaaagatcatgcgaacgaattaaatcatgaagtggaaaaattatatgtatttacaaaagcagcgtcatctttaacaggagataatgcaacaattccaaatcataaagatattactgatcaattagattatgaaggtgaattaggtattgttattggtaagtctggtgaaaagattccaaaagcattagctttagattatgtttacggctatacaattattaacgatatcactgatcgcaaagcacaaagtgaacaagatcaagcatttttatcaaaaagtttaactggcggttgcccaatgggtccttatatcgttactaaagacgaactaccattacctgaaaatgtaaatattgttacaaaagttaacaatgaaattagacaagatggtaacactggcgaaatgattcttaaaattgatgaattaatagaagaaatttcaaaatatgttgcactacatccgggagatattattgcaactggtacaccagcaggcgttggtgcaggtatgcaaccacctaaatttttacaaccaggtgatgaagttaaagtgactattgataatattggaacgctgacaacttatatcgctaaataattatcatttaaaaagctaaccagtctttatatagattggttagttttttcttgcttttctaaaaaggtgttaaagataaattatttataatgttaccattttgagatgaaagtgaaatattgatattaagaagtagttgattattttacagcagattcacaatattctaataaggaataaaatgtcatgttcttcctctcaaatatagaagtgtggtagaatatatattcgtgtataatcaaatcatgattaaattacaagcaagtgggtattaatcccaagaagctttaatttaataatataaataattaaagtggggggaatcagtatgttacatttacatatattaagttgggtattagcgattattttatttatcgctacatacttaaacatttcaaaaaatcaaggcagatcaccatttttcaaaccgttgcacatgattttacgcttatttatgctgttgacgttaatttcaggattttggatattaattcagtcatttatgaatggcggggcaaatcatatgttgcttacattgaaaatgctgtgtggtgttgcagtagttggattgatggaagtgtcgattgctaaaagaaagagacatgaacaaagtcacacaatgttttggataacaattgcattaattatcatcacaatggtattaggtgtcattctaccgttagggcctatatcaaaattattcggtattggctaattgataagacatatagtatatgacataaggcatggacaattattagtccaagaccttatgtcttttttgattctaaaaatgttaaacataaaaaatggactggatagtagtaccagtccaacataattctaacctagacaattaagattagattgaatcgcatgattcatttatttagctttgtaaccaatcatattgattaaatctttagggtggctatatggtggtgcataagccacttcaaactcagttaactcatctacagttagctggttcatcattgccatcgatagtacatcaatacgtttatctgcaccttcttttcctactgcagctgctcttaaaatctgacggtttgaagtgtcataatatactcttaagtgtaaaggggaatttcctgggtaataattcgcgtgtgcaccttgagtgacttctaccattttatagtcaaattgctttagttcgtttggtttaacgccgacactcgcaaatgtataatcaaagaacttcacaatattgttgcctaagaagcctttgaattcaatagtgtcatttccagcaatttgttcggcaacaatacttgctgcacggtgagcgccccaagctaaaggaacactagccggtagatcgacatgtcgataatgtgatgttgcaatatcgcctattgcataaatgtttggaacatttgtttcaaatttatcgtttaccggtatgaaaccttttcgatcaagtttgatatttgaactttcgataaattttgaattggggtgagtaccgacaccttcaataatcatatcgtaatgttcaacttttcctgatttaaatgtaatttcatttccattgatagcattaatttcctcatttaaacggtatggaatctcccgcttatctaattcatcaagtataggttgattcatgtcggcatccattaatttatttatcttatcagatcgatgaattaaagtagggtgtaaaccacgttcataaagattttcaagaacttctaatgaaacataacctgcacctacaaccaatactttatcaacttgatttgctttgatgaattgatcgatagcatcagtgtcttctaaatttctaagtgtaaatgtaatatcactttcaaagccaaggctatttgcacttgcaccagggcttaaaatgagtttatcgtaagattcttcaaattgttcgtttgtctttctatttaatacagatacagtttgtctttcatcattgattgcaataacttcatgataagtttttactgtaatttgctttctatcataaaatttttcaggtgtatacgctaaagcatatcttctatcttcaacaacttcgccaatgacataaggcaatgcacaattagcaaagctcatatcacgatctttttcaaaaataataatgtcactttctttatctaaacgtcgaatttggctggcacatgttgcaccgccagcgactgctccgactacgactattttgggcatcgtaacttacctcctattgttttaaaatattataaaatgattagttataaattaacagtaatatctaatatttaaattaaagaaatcattcaaatatcgaccaatgccatcttcattattgttgaatgtaatattgttcgctacatctttaagttcttgcaaaccattttccatagcaacaccgtgacgcgcgtactcaatcatttcaatatcattatcttcatcaccgaatgcaataatattatttcggtcaatatttaaaaattgtctaacttgctcaatgcctcttgctttattaataccaagttttacaatttcaatgacagggaatggtgcgccccagcgtcgatgctcaatatgatcggcataaaaatgagtaagcatatttttgatttcaggtattttactttcttcggcttcaattaaaattgaggtaggggattctttcaagtggacaagtaaattaccagtttgaattcttggattacccattgaaaaaccttcaaataatcttggatcatgattgttaatgaaaacataatctttcacttctgctataatattcgatacttgatattgttgtaatccttgaataatgttttgtgcgatgcctaaatctaaaatttcatggcaagttttgaagtttttatctttagggtgatgtacgtaagcgccattaaaattaacaattggtgtcgttaaatttaattcatgataatacatttgacttgcacgataaggtctgccagtcgcaatcataatttggtgtccacgttgttgtaattcatttaatacttgtttagtatatgatgaaatttctttgttatcgtttaataatgttccgtctaagtctagacatattaaatgtggttgcatatctctctcctcataagttgcttagttcatatagatacatcatagcattttattggcgttttgtcggatatttgatatattatgaataatatgacattaaagaggtgatatggatggaagaggcattgaaagatagtatcttaggtgcattagaaatggtaattgaccctgaattaggaattgatatcgttaatttgggtttagtatacaaagtgaatgttgatgatgaaggcgtatgtacagttgatatgactttaacatcaatgggatgtccaatgggacctcaaattattgatcaagttaaaacagtattagcagagattcctgaaattcaggatactgaagtgaatatcgtatggagtccaccttggacaaaagatatgatgtcacgttacgctaagattgcacttggtgtgagctaacataaacttgcattgcctgtagaatttcttttcgaaattctctgtgtttgggcccgcagtcaatataacattgtagagtataattcattgtgaataagctcccttcaaagtagacattgaaaaatgaaaattttgaagggagccttatttatgttctagtttctgattttattttgaaaatttatatctaacttgtttcaaaaaatatgaattaagacagtgacttgcacttccaagagtgcacaattcattttctagttgaatattttcttgaaaatttttataataaattgaatttatattacagttatattacaatacataatacttcatagtttttaagttgccgagttgcattacaaattggatttcgaagtaagaatcatcattggtaatttttttaatttaacagtattttagtcaatatgattttgatgatgtcgtaattcaataatatacatatgcatttcaatattcttttaaacagcataactaaatttaattaagcatctaagaagaacagttttaaaagggaagaatgcaaaaatgaacaaaacaaagggttttacaaagtataagaaaatgagatatattccagggctcgatggtttgagggcaatcgctgttctaggaattattatttaccacttaaataagcaatggttgacaggtggctttttaggtgtggatacattttttgtgatctctggttatttaattacaagcttattactcaaagagtatgatgacacaggtatcattaaattgaaaagcttttggatacgtcgtttaaaacgtttattaccagcagtcatagttttattaatggttgtagggacagcaaccttattattaaaatcagataatatcattagggttaaacatgatattattgctgcgatattttatgtatcaaactggtggtatatagcaaaagatgttaattattttgagcaattttcatttatgccattaaagcatttatggtctttagcaattgaagaacagttttacatatttttcccagttattttggttacattattgttaacaattaaaaagcgatacaaaataggatttattttttggggagtatcaataatttctttagggttaatgatgtttatctatagtattaatggggatcattcacgagtgtattttggtacagatactagattacagacattgttactgggtgttattttagcttttttatggccaccgtttaaattgaaaaatgatccacctaaagttgtaaaatatgttattgatagcataggtagtttatcatttatagtacttatattattatttttcattattaatgatgagacgaattggatatatgatggtggtttctatttaatatccatattaacgttatttattattgctagtgtcgttcatccatctacatggatagcgaagatattttcaaatccagtgttagtatttatcgggaaaaggtcttatagtttatatttatggcattttgcagtaattagtttcgtacatagttactatgtagacggacagatacctgtatatgtgtactttatagatataagtttaacaattatatttgcagagctatcatatcgctttatagaaactccatttagaaaagaaggtattaaagctttaaattggcgaccttcttatataccacaatttataagaatggcaattgtagtaaccttgttaattccatttatgttgattttagtaggtgcattcaataaatatggtaaagacattattggagaaaaagcgaatagctttgataccacaattgaagataattatttaatgcggatagcaccaattgataacatacacattgatggcttagtaagtgagaagaaaaaggaatcttccgacgtatataataatattaaacctcttttaatcggtgattcagtaatggttgatatcggtgagtcatttaagtcatcagttcctaagtctagaattgatggaaaagtagggcgtcaattgtatcaaaccttacctttagttaaagcgaattattcacaatataaaaaatcatctgatcaagtcgtattagaattaggtacaaatggcgactttactgtcaaacagctcgacgatttacttaatcaatttggaaaagccaagatttatttagttaatacacgtgttccaagaatttatgaggcaaatgtaaatcgattattagctgacgcggcgaaacgaaagtccaatgtcacattaattgattggtataagcgatcacaaggacatagtgaatattttgcaccagacggtgtacatttagagtacaaaggagtcctagctttaaaagatgaaatattaaaagcacttaaaaagaaataacatatgtttaataagtctagttaatgtgtaacgtaacattagctagatttttttattcaaaaaaatatttacaaatattaggaaatttaagtgtaaaagagttgataaatgattatattgggactataatataattaaggtcaaagaaagtcaaagtcaaaagtgcaacttgaccaactctacaaattagaggtgaaattatatggatataaataaaatgacatatgctgttcaaagtgctttacaacaagcagttgaactgagtcagcaacataaattacaaaatatagaaattgaggcaattttaagcgctgccttaaatgaaagtgaaagcttatataaaagtattttagaacgagcaaatattgaggtagatcaattaaacaaagcttatgaagacaaactaaacacgtatgcatctgtagaaggtgacaatatacaatatggtcaatatattagccaacaagcaaaccaattgataactaaggctgaatcatacatgaaagaatatgaagatgaatatatttcaatggagcatattttacgttcggcaatggacattgatcaaacaacaaaacattatataaataataaagtagaagttatcaaagaaattattaaaaaagtaagagggggaaatcacgtgacatcacaaaatccagaagttaattacgaagcattagctaaatatggccgcgacttagtagaagaagttagacaaggtaaaatggatcctgttataggaagagatgaagaaattcgaaatacgattcgtattttaagtcgtaaaactaaaaacaaccctgtgctcattggtgaaccaggtgttggtaaaactgcaattgttgaaggattagcgcaacgtatagttaagaaagatgtgccagaatcattattagataaaactgtttttgagttagatttaagcgcattagtagcgggcgctaaatatcgtggtgaatttgaagagagattaaaagcagtcctaaaagaagttaaagagtctgatggtagaattatattatttattgatgaaatccatatgcttgtaggtgctggtaaaacagatggtgccatggatgcaggcaacatgctaaaaccaatgttagcacgaggagagttacattgtattggtgcaacaactttaaatgaatatcgagaatatattgaaaaagattcggcattagagcgtcgtttccaaaaagtagcagttagtgagcctgatgttgaagatacaatttcaattttacgtggtttaaaagaacgatatgaagtgtatcatggtgtgcgtattcaagatagagccttagttgctgccgctgaattgtctgatcgttacatcactgatcgttttttaccagataaagcgattgatttagttgaccaagcatgtgcaacaattcgtacggaaatgggatcaaatccaactgaattggatcaagttaatagacgtgtcatgcaattagaaattgaagaaagcgcacttaaaaatgaatctgacaatgcgagcaaacagagattacaagaactacaagaagagcttgccaatgaaaaagagaaacaagcagcacttcaatctcgtgtagaatcagaaaaagaaaaaatagcaaatttacaagaaaaacgtgcgcaactagatgaaagtagacaagcgttggaagatgcacaaacaaataacaatttagaaaaagctgctgaactacaatatggaacaattcctcaattggaaaaagaacttagagaattagaggataatttccaagatgagcaaggtgaagatacagatcgaatgattcgtgaagttgtaacagacgaagaaattggcgatattgtcagccaatggacaggcataccagtttcaaaattagttgaaacagaacgtgaaaaattacttcacttaagtgacatcttgcataaacgtgttgtaggtcaagataaatcggttgacctggtttcagatgcagtagttagagcaagagcaggtattaaagatccaaacagacctattggtagtttcttattcctaggtccaactggagtaggtaaaactgaattagctaaatcattagctgcatcattatttgattctgaaaaacatatgattcgtattgatatgagtgaatatatggaaaaacatgcagtatcaagattgataggggcacctccaggatatattggacatgatgaagggggtcaattaactgaagcggttcgtcgtaatccatactcagttattttattagatgaggttgaaaaagcgcatactgacgtctttaatgtattattgcaaattttagatgaaggccgtttaactgattctaaaggacgtagcgttgattttaaaaatactattattattatgacaagtaatattggatctcaagttttattagaaaacgtaaaagagactggtgaaattacagaatcaacagaaaaagctgttatgacaagtttaaatgcatatttcaaaccagaaattttgaatcgtatggatgatatcgtattatttaaaccattatctattgatgacatgagtatgattgtagataaaatcttaacgcaattaaatataagattattagaacaacgaatctcaattgaagtttctgatgatgctaaagcttggctaggtcaagaagcttatgaacctcaatacggtgcaagaccattaaaacgttttgtacaacgccaaattgaaacaccattagcacgtatgatgattaaagagggattcccagaaggtacaacgattaaagttaatttaaattcagacaataacttaacgtttaatgttgaaaaaattcatgaataaaattgaaccaagaatgtgatgattaatcgcattcttggttttttagatttgaaatttattataattgttcattggcaatatactttttaaatgatttaataaacaccaatatttctgggctttcttttttgctgtatatatatgtaaatgaaataggtgcttgtaaaattttcgtgttaataaccgaaatattgtaatcactatttgttgttatataaagaggcaggaatgatataccttgattcatttcgattaatttaattgaagtatgcacatcattgatagatagaaattgtgctttttcataaatatttaaaatattatttttaagtgatgaccaatattctggatggttatcacttattattttgtatttttcaaataaagatgcctcagttagaagatgattattctctttattgggagcaatcaatacaattttaccttcgcatactttttcagaatgaacttctcttagtttaggttgatttctgctaatcccgatgtcatacgtatgattattaatatctttttcaatattttcatttttgacatgaagagaaacatcgataaaaggatgctcgttaaagaaagattttaaaaatttgggcataatgaatgtcgcgatatatgaagacacgacaacatttaatttcgattgaaacatcgtttttttaagttggatatgtttgatgccactttcatattgttcaataaaactttgcgcaattggaagaaatgtatgaccatcttcagtcaagataatttgatttttataagtttcaaatagtttcacattgagatgctgttctaaatttttaatttgcttatgtatagaaggtatagtgagattaatttcttcactagctaatcgatagtttaacgtcttcgctaaaatgacaaatgtatagtaccaatctaaattcatgaacttacctctttcaaaaaagttaataattcattagataatatttaatttttattgcataaaaataatattaatattatatcagaggttatagagggggtgaagtaatatgattcggattcaagataatacaataagggatggtatgcaacaaagtaatgttcgaaaaagtctaattataaaaaaagaagtattgaaacaaattaacaagttaaatataaattctgttgaagtaggcatgtgtacaactatcgaggatgaatttaatattcatcaattcagagacattttaagtcctgaaaaagaattagtagtattgactaggcttaatgaaaaagaaataaaaaaaatagtcaaattgaaaattcataatttagtggtaaaaatactattgccaatatctgacttgcatataaaagaaaagcttaatttttcaaataaatattatattcagaaaatcaaagactgcttggatatattaaagaaagataaaaaaggagtagatatttgttttgaagatggaacaaggacttctagagaaaaattgaaagaatacatggaaattatttcaaaatatcaagttagaacagttacatttgcggacactgtaggatgttcgacaccattagaatacggagatatttttaattactttgtaaaaaaatattctaacataattttttctgctcattgtcataacgatctagggttggctactgcaaatacattagctgcaattttaaatggtgcaaagcaaatagaaactacatttttgggaattggtgagagagcgggtaatgctcctattgaggaaataattactattttgacaaaaaaacaaatagaaagtacggaattcactttacccgacgtatataaaactagtattaatatttctaaaattctcgattttcaaatatcagaaaacaaacctataattggtgaaaatatatttaaacatgaatcaggaattcatcaagatggtactaaaaaaaatataaatatgtatcaatatttagttcctagtgatttaggattgaaaaattcacaagttgttcagtttccaataagtaatatttctagtaagaaaatcttgcacaataaatttaaatcaatagttaacactgaagaaattgatgaaaatatttctttctataaacttgtgaacaagttttcacctgaagtagcacctgaagatacagtggatttacttcagataataaaaaggaggagtaaagatggaaattttaaatgattctgtaaaaagttttgaaaaactttatttacaattacaagatggttttccagtgattgttcctactgatactaattataatttatgtagtttacctaacaacgatctttgtatcgataaaatatttgaatataaaaagcgatcgaaagataagccattatcattatttattgataagccagaggattggaaattgtatggagataatcaaaatacggaaatagttgataaactagttgaaatattttggcctggtccattaaatattattttaaaaaataaaacaagctataattatatgctcaataattcagatagtatagctataggatgtgtacaaaataaaacgatgagaagatttatttcatatattaattcacctatagcaattacttcagcaaatatatctggaactgccgatgatattttaataactgaaaatgaagcaattaagcacatgggcgaaaatgtaagatatatgctaagaagtcaaaataaaactaactataaaacatctagtacgattattaaagtgacagataataaaattgaattattaagagaaggagatataaagtttgaagaaataaaagaaagactaggtacaggtattatttatgaataagttaatacttgggatttatttataccgaattttttcacgagcatacttttatttaccgtttttattaatttactttttgattcaaggttattccataatacaattagaaatattaatggcgtcttatggcattgcagcatttttattctctctatacaaagagaagtgttttaaaatttgtaacttaaaagattctaataaattagttgttagtgaaatattcaaaatcatcggtttattgttgttattatatcaaaatcaatatttaattttagtagtggcacaaatattattagggttaagttactcaatgatggcgggtgttgataccgcaataattaaaagaaatataacaaatgagaaatacgtacaaaataagtcaaatagctatatgttcctatcattattaatttcagggattataggtagttatctttatggaataaatattaaatggcctataataatgactggtatattttcaattctaacaattataattattcgatgcacattagttgaaaatagggaattaaatttaataggagaaacaaagggaaagataaagaaatttctaccagaagagaagttttggatattgcattattcttttttaagagcgttaatattaggattttttataggatttattccaattaatatatataatgatttaaaactgaataatttacaatttatttcagtattaacttgttacacagttatgggttttgtatcttcacgttatttaactaaatacttgaattataagtttgtgtcagaaatttgtttagtaatatttttaataatatatacatatcaaagtttcatagcagttactatttctatgatatttttaggtatttcttcagggttaactcgtccacaaactataaataaactttctagcagtagtaacttaagagtgatgcttaattatgcagaaacgttatattttatttttaatatcgcatttttacttatgggtggttacttatatacaataggaactattcaatacttaatattatttatttcgttattaatttttatatatttaataataatattttattttacaaggagagagcaacatgaaaataaaaactgaatttaaagggaacaatataccatatgaatacgcagcaggtgcagatgtgagtgattctattaacgggaatccaattaagtcatttccatttgaagtaattgaattaccggaagggactaaatatcttgcttggtctttaattgactatgatgcaattcctgtatgtggctttgcttggattcattggagtgtagctaatgtaagtgttagtggcaattcaatttctataaaagcagatttatcaagaacaaagggcgactatgtacaaggtaaaaatagctttactagtgggttgttggctgaagatttttcagaaatagaaaatcactatgtaggacctacaccacctgatcaagatcatcaatatgaattaacagtttatgcgttagatcattctttaaatttgaagaatgggttctacttgaatgaatttttaaaagaagtaaatcaacataaaattgatcaaacaagtattaaccttataggaagaaaaatttaatactaaatatctcatcaatataaaattgttcaattaaaagtacaaagaaacaaaggttttaatttatatattaggtacggcgttcgctataatgcaaagaagtaattaaatttaagaaatgtaaacttagttattgtaatgtgaatttatttgaaaaaatagaaagtattaacaattatagcttttacattaattaaaatttatttttaaaaacaagtaaacaatttacatacttataatttttgaaacttttcaatttgtgttatattgattttgtaagatactttaactcacaaaggagagagattatatgaaattaaaatcatttataactgtaactttggcactgggcatgatcgcaacgactggcgctactgtggcaggtaatgaggtatctgcagcagaaaaggacaaactaccggcaactcaaaaagctaaagaaatgcaaaatgttccatatacaattgcagtagatggcattatggctttcaatcaatcttacttaaatttaccaaaagatagccaattatcatatttagatttaggaaataaagttaaagctttgttatatgatgaacgcggtgtaacacctgagaagattcgaaatgcaaaatctgccgtttacacgattacttggaaagatggtagtaaaaaagaagtggatcttaagaaagatagctacacagcaaacttgtttgattcaaattcaattaaacaaattgatattaatgtaaaaactaaataaacacttaaaattatcaaattcaacatgaagcatttaattttacagtgatgattataaaataattgccttgatacaaagattactcgtaaatgacatctttgtattaaggctttttctaaatttaaaagtgatgggttagaggtcattgagctttaaaatattcaaaatacaaaacattaatggccaaaaataaaagccgcctttatctgggcagcttcaataataagaaagacatatttcattttatactaaatagttattgtgatgaatctttcggcggtttaattactgcagcaaaaattgctgtgaaaatcgtgaacaatactgccatgataattggattcactacatttaagctgtctccacctactaggctattaagtacaaagttaaccatttgcattaataataatgcccaaaagaatgttacgaggtgtttcatgtcattctacctccactttaattatatatattttattttaagtgaaagttagaaatttgtatagtaacatctcatatattttgaccatattatacagtttaaataaatgattttatctgaatggctattctaaattaagcgcattaaaaccaatttcatactgaaatttgacgataataaagcattaaaattttattaactagtcaatattcctacctctgacttgagtttaaaaagtaatctatgttaaattaatacctggtattaaaaattttattaagaaggtgttcaactatgaacgtgggtattaaaggttttggtgcatatgcgccagaaaagattattgacaatgcctattttgagcaatttttagatacatctgatgaatggatttctaagatgactggaattaaagaaagacattgggcagatgatgatcaagatacttcagatttagcatatgaagcaagtttaaaagcaatcgctgacgctggtattcagcccgaagatatagatatgataattgttgccacagcaactggagatatgccatttccaactgtcgcaaatatgttgcaagaacgtttagggacgggcaaagttgcctctatggatcaacttgcagcatgttctggatttatgtattcaatgattacagctaaacaatatgttcaatctggagattatcataacattttagttgtcggtgcagataaattatctaaaataacagatttaactgaccgttctactgcagttctatttggagatggtgcaggtgcggttatcatcggtgaagtttcagatggcagaggtattataagttatgaaatgggttctgatggcacaggtggtaaacatttatatttagataaagatactggtaaactgaaaatgaatggtcgagaagtatttaaatttgctgttagaattatgggtgatgcatcaacacgtgtagttgaaaaagcgaatttaacatcagatgatatagatttatttattcctcatcaagctaatattagaattatggaatcagctagagaacgcttaggtatttcaaaagacaaaatgagtgtttctgtaaataaatatggaaatacttcagctgcgtcaatacctttaagtatcgatcaagaattaaaaaatggtaaaatcaaagatgatgatacaattgttcttgtcggattcggtggcggcctaacttggggcgcaatgacaataaaatggggaaaataggaggataacgaatgagtcaaaataaaagagtagttattacaggtatgggagccctttctccaatcggtaatgatgtcaaaacaacatgggagaatgctctaaaaggcgtaaatggtatcgataaaattacacgtatcgatactgaaccttatagcgttcacttagcaggagaacttaaaaactttaatattgaagatcatatcgacaaaaaagaagcgcgtcgtatggatagatttactcaatatgcaattgtagcagctagagaggctgttaaagatgcgcaattagatatcaatgaaaatactgcagatcgaatcggtgtatggattggttctggtatcggtggtatggaaacatttgaaattgcacataaacaattaatggataaaggcccaagacgtgtgagtccatttttcgtaccaatgttaattcctgatatggcaactgggcaagtatcaattgacttaggtgcaaaaggaccaaatggtgcaacagttacagcatgtgcaacaggtacaaattcaatcggagaagcatttaaaattgtgcaacgcggtgatgcagatgcaatgattactggtggtacagaagcaccaattactcatatggcaattgctggtttcagtgcaagtcgagcgctttctacaaatgatgacattgaaacagcatgtcgtccattccaagaaggtagagatggttttgttatgggtgaaggtgctggtattttagtaattgaatctttagaatcagcacaagctcgaggtgccaatatttatgctgagatagttggctatggtactacaggtgatgcttatcatattacagcgccagctccagaaggtgaaggtggttctagagcaatgcaagcagctatggatgatgctggtattgaacctaaagatgtacaatacttaaatgcccatggtacaagtactcctgttggtgacttaaatgaagttaaagctattaaaaatacatttggtgaagcagctaaacacttaaaagttagctcaacaaaatcaatgactggtcacttacttggtgcaacaggtggaattgaagcaatcttctcagcgctttcaattaaagactctaaagtcgcaccgacaattcatgcggtaacaccagatccagaatgtgatttggatattgttccaaatgaagcgcaagaccttgatattacttatgcaatgagtaatagcttaggattcggtggacataacgcagtattagtattcaagaaatttgaagcataactataaaaatcttcagtaacgttgttttagttactgaagattttttcagtttctttatactaagatgagcgacagcacaatcgtcataataaaatataaaatatttattaataataaggggattatccatgtagaaacaaagtaatgctctttttttacctcttgtgggttgaaaaatggatcatcagagatagacttcttctttttcgaagatgacatttgatactttaatcttctaaaaccataacttgtcgcatcaaaaatgccttcttgtacaagtaaaatcaaaaatatgctaataaaaataattaatgaaacataaaacaatatatttaaatatgtaatgatagtatggctattaaaaagccatataataaacgttaatattggcgttattagtgccattccaagccattttttcaacatttgatcactcccacttatagaaaactcttacgcatagtttacattaaaatcagacattgaggaatgattttttaatttcttcagctttattgaaattctaaaatcaatcattcttcattagtttaaagcaaaaaaatattgatatatagtaaatattgtatatataatattagttaagatttcagaaaattttgaagggaatggaaatttagaaatcggaatttgttagaggaggggattagatggggaaatatattttcaaacgatttatttatatgcttatttctttatttattattattacaattacatttttcttaatgaaattaatgccaggttcgccatttaacgatgctaaattaaatgctgaacaaaaagaaattttaaatgaaaaatatggattaaatgatcctgtagctacgcagtatttacattatttaaaaaatgttgttacaggcgattttggtaattcattccagtatcataatcaacctgtgtgggatttgattaaaccgagactactaccttcttttgaaatgggtcttacagcaatgttcatcggtgtgatactgggacttattttaggtgttgcagcagctactaaacaaaattcttgggttgactatacaactacagttatttcagttattgcagtatctgtaccatcttttgtacttgctgtacttttacaatatgtatttgcagttaaattaagatggttcccagtagctggatgggaaggtttttcgaccgcggtattaccgtcacttgcattatctgcagctgttttagcaactgtcgccagatacataagagcagagatgatagaggtattaagttcagactatattttattagcgagagctaaaggtaattcgacaatgcgtgtactttttggacatgcacttagaaatgctttaattccaattattacaattatcgttcccatgttagcaagtattttaacaggcactttaacaattgaaaatatttttggagttcctggattaggggatcaattcgtacgttcaattacaacaaatgatttctcagtaatcatggcaatcacactattatttagcacactgtttatcgtttctatttttattgtagatattttgtacggtgtgatagatccacgaattcgtgttcaaggaggtaaaaaataatggctgaaaataaaaacaatttgtcgattaacgacgatcattctaatgcagctatgacgcatacctctgacgctatcgcatcatctgattttattattagagaattagatttgaatcaggaacctgaaatgcaacgagaaagcaaaaacttttggcaagatgcttgggctcagttaaaacgaaataagttagctgttgtcggtatgataggtttaattatcattgtaatatttgcttttatcggtccagttataaataaacatgattatgctgaacaaaatgtagaacatagaaatcttccggcaaaaatacctgtattagacaaagttccatttttaccttttgatggtaaagatgcagatggcaaggatgcttataaagcagcaaatgctaaagaaaattattggtttggtactgatcagttgggtcgagatttatggacaagaacatggaaaggtgctcaaatttcattgtttatcggtgttgttgcagcgatgttagatatttttattggtgttgtatatggtgcgatttctggattcttcggtggacgtgtcgatacgattatgcaacgtatacttgaagtcatagcatctattccgaatttaattgtcgtaattttatttgtattaatttttgaaccatccatttggacaattatattggctatgtctatcacaggctggttaggcatgagcagagttgtacgtggagaatttttaaaattaaaaaatcaagagtttgtcatggcttcgaaaacattgggggcttcaaaattcaaattgatatttaagcatattttacctaatacattaggtgctatcgtggttacatcaatgtttacagtacctagtgctattttcttcgaagcatttttaagtttcattggtataggtgtacccgcacctcaaacatcgttagggtcattagtaaatgatgggcgcgcaatgttattaatttatccacatgaattatttataccagcaatgattttaagtttattaattctattcttttacttatttagtgatggattacgtgatgcatttgatccgaaaatgcgtaaataaaaagggggcatagcatatgactgaaagaatattagaagtaaatgatttgcatgtttcctttgatattacagcaggggaagtgcaggcagtgagaggcgtagatttttatttgaacaaaggggaaacattggcaattgttggtgaatcaggttcaggtaaatctgtaacaacaaaagcaattacaaaattattccaaggggacacaggaagaattaaaaagggagaaattttatttttaggggaagatttagcaaaaaaacctgaaaatgagttgattaaattacgtggcaaagatatttcaatgatctttcaagatccaatgacatctttaaacccaacgatgcaaattggtaaacaagtcatggaaccattaattaagcacaaaaattatagtaaagcacaagctaaaaagcgcgcattggaaatactaaatcttgtaggtttaccaaatgcagaaaaaagatttaaagcatatcctcatcaattttcaggtggacaaaggcaaagaattgttattgcaaccgcattagcttgtgaacctaaagtgctcattgctgatgaaccaacgactgcattagacgtaacgatgcaggcacaaattttagatttaatgaaagaactacaacaaaaaatcgatacagcaattatttttataacgcatgatttaggggttgttgcgaatattgctgatagagtggcagttatgtatggtggtcaaatggttgaaacaggagatgttaacgaaatattttatgatccaaagcatccatatacatggggattattatcgtcaatgcctgatttatcaacaacaaatgacacaccattactagcgattcctggagcgccacctgatttattacacccacctaaaggtgatgcatttgcgagacgtagtcaatatgcattagatattgattttaaagtagaaccaccgtggtttaaagtttcaccgacacattttgtgaaatcttggttattagacgcacgtgcaccaaaagttgaactacccgagctggtaaaacaacgtatgaaaccgatgcctaataattatgaaaaaccactcaaggtagaaagggtgtcgttcaatgaaaaatgatgaagtgctattatctattaaaaatttaaagcaatattttaacgcaggaaagaaaaacgaagtgagagcgattgaaaatatttcgtttgatatatacaaaggggaaacattaggtttagtaggagaatcggggtgtggtaaatctacaactggtaaatcaattattaaacttaatgatattacaagtggagaaattttgtatgagggtattgatatacaaaagattcgtaaacgtaaagatttgcttaaatttaataaaaagatacagatgatttttcaagacccatatgcgtctttaaatcctaggttaaaagtaatggatatagtagctgaaggtattgatatccatcatttagcaactgataagcgtgaccgaaaaaaacgtgtctatgatttacttgaaactgttggattaagtaaagaacatgccaatcgctatcctcatgaattttcaggtggacaacgccaacgtattggaattgcccgtgcattagccgttgaaccagaattcattatcgcggacgaaccaatatcggcattggatgtttcaatccaagctcaagtagttaatttattattaaaattacaacgtgaaagagggattacgttcctatttatagctcatgatctatcaatggtgaagtatatttcagatcgtattgcagtcatgcattttgggaaaatagttgaaattggaccggcagaagaaatttatcaaaatccattacacgattatactaagtctttattatcagccattccacaacctgatcctgaatcagaacgcagtcgcaaacgatttagttatattgatgatgaagcaaataatcatttaagacaattacatgaaattagaccgaatcactttgtctttagtactgaagaagaagcggcacaactacgagaaaataaattggtgacacaaaattaaggggaagggggaaatgcaatgacgagaaaatttagaacacttattttaattttgattgctacaattgcattaagtggttgtgctaatgacgatggtatttattcagataaaggtcaagtattcagaaaaattttgtcatcagacttaacatcccttgatacatcattaataacggatgaaatatcttctgaagtgactgcgcaaacattcgaaggtttatacacattaggaaaaggtgacaaaccggtgttaggtgttgcgaaagcttttcctgaaaagagtaaagatggtaaaactttaaaggttaaattaagaagcgatgctaaatggagcaatggtgacaaagtgactgcacaagactttgtttatgcttggagaaaaacagttgaccctaaaacaggttctgaatttgcatacattatgggggacattaaaaatgcgagtgatattagtactggtaagaaacctgtagagcaattaggtatcaaagcattaaatgatgaaacattacaaattgaattagaaaagccggttccatatattaatcaattattagcacttaatacctttgcacctcaaaatgaaaaagttgccaaaaaatatggtaaaaattacggtacggcagctgatagagcggtatacaatggtccatttaaagttgatgattggaaacaagaagataaaaccttactatctaaaaatcagtattattgggataaaaagaatgtaaaattagataaagtgaattataaagttattaaagacttacaagccggtgcatcattgtatgatactgaatcagtagatgacgcagttattactgcagatcaagtaaataaatataaagacaacaaaggattaaactttgtgttaacgactgggacattttttgtaaaaatgaatgaaaaacaatatcctgattttaaaaacaaaaatttaagattggctatcgcacaagcaatagataaaaaaggatacgttgattcagtgaaaaacaatggctcaattccttccgatacactaacagccaaaggaattgcgaaagcgcctaatggcaaagattatgcgagtaccatgaattcgcctttaaaatataatcctaaagaagcaagagcacactgggacaaagctaaaaaagagttaggtaaaaatgaagtgacattttcaatgaacacagaagatacaccagatgcaaaaatatctgctgaatatatcaaatcgcaagttgagaaaaatttaccaggagttactttgaaaattaagcaattaccgtttaaacaaagagtatcactagaactgagtaacaattttgaagcatcacttagtggttggtctgcagattaccctgatcctatggcttatttagaaacaatgaccacaggtagcgcacaaaataatacagactggggtaataaagaatatgatcaattacttaaagtagcaagaaccaaattggcacttcaaccgaacgaacgatatgaaaacttgaaaaaagcagaagaaatgttcctaggagatgcaccggtagcaccaatttatcaaaaaggtgttgcacatttaacaaatcctcaagtaaaaggattaatttaccataaatttggtccaaataactcacttaaacatgtatatattgataaatcgatagataaagaaacaggtaagaagaaaaaataatatgctttgtaaattaggctggagacatatctccagtctttttgtgttggataaaaactttgggaataaaaatttaaaataagtcgttttttaaattactgaaattgattaaatgcataaataactgaatattctaaaaataaacttgtaataattttttctatgagtaaactaaaaagaaaaaattagattgaaagtaggaggcatatgtgtggggaagctaattaaatatatttcaatacttcttattgtcgttttagtgttgagtgcttgcggaaaaagcagtaataaagatgaaggagtaaaagatgctactaaaacggaaacctcaaaacataaaggtggtaccttaaatgtagcattaacagcaccgccaagtggtgtttattcttcgttattaaatagtacacatgcagattctgtagttgagggatattttaacgaaagcttattagcaactgataaaaaaatacgtcctaaggcatatattgcttcatggaaggacatcgagccggctaagaaaatagaatttaaaattaaaaaaggtattaaatggcatgatggtaatgaattgaaaattgatgattggatttattcaattgaagtcttagctaacaaggactacgaaggtgcttattatccaagtgtagaaaatatccaaggtgcgaaagattatcatgaaggaaaaactgatcatattagcggattgaagaaaatagatgactacactatgcaggttacatttgataaaaaacaagaaaattacttaacaggatttattactggacctttattaagtaaaaaatatttatcagatgtaccaattaaagatttagcgaaatcagataaaatccgaaaatatcctattggtattggaccgtataaagttaagaaaatcgttccaggtgaggctgttcaactcgttaaatttgatgattattggcaaggtaagcctgcactagacaaaatcaatttaaaagttattgatcaagcgcaaattattaaggcaatggaaaaaggcgatattgatgttgcgaatgatgctaccggtgcaatggcaaaagatgctaagtcatctaatgctggtctcaaggtattatctgcgccaagcttagactacggtttaataggattcgtatctcatgattacgataaaaaagctaataaaactggtaaagtgagaccaaaatatgaagacaaagaattacgtaaagcaatgctttatgcaattgatagagaaaaatggatcaaagcgtttttcaatggttacgctagtgaaatcaatagttttgtaccatctatgcattggatagcagccaatcctaaggacctaaatgattacaaatatgatcctgaaaaagctaaaaaaatcttagataagttaggttataaagatagagatggtgacggatttagagaagatcctaaaggtaataaatttgagattaactttaaacattattcaggttctaatcctacttttgaaccaagaactgctgcgataaaagatttctgggaaaaagttggcttgaaaacaaatgtgaagttagtagaattcggtaaatataatgaagacttagcaaatgcatctaaagatatggaagtgtacttcagatcatgggcaggaggtacagatccagatccatcagatttataccacactgatagacctcaaaatgaaatgagaacagttttaccaaaatcagatcaatatttagatgatgcattagacttcgaaaaagtaggcattgatgaaaagaaacgtaaagatatttatgttaaatggcaaaaatatatgaatgatgagttacctggattaccaatgttccaaggtaaatcgataactattgttaacgataaagtacgaaacttagacattgaaattggaactgatcaaagtttatataatttaactaaagaagcttagtaatgtaacctcgacgattttgtcgaggtttacttatatggggggatgttatgaataatgtattgttagaggttaaagatttagaaacatcattaaaaataaataatgaatggttagcaactgttgaaaatatttcttttgaattatctaaaggagaagttttgggtatagtaggggaatctggttgcggtaagtccatattaagtaagtcaattattaaattattaccagaaaagatatctaaactaagtaatggagaagttatatttgatggtaaacgaatcgatacgctcaatgagaagcaattgctagatattcgaggaaatgatattgctatgatttttcaagaacctatgactgctttaaatcctgtatttaccataaaaaatcaacttgtggaatctataaaatcacataaaaaaatttctaaaaaagaagcaaataaattagcaaaagatttactaaaaaaagttggaattgctagacaagatgaaatattaaatagctatcctcatcaattatctggtggtatgagacaaagagtaatgattgcaatggccatttcatgttctcctaaattattaattgctgatgaacctacaacagcattggatgtcacgattcaagcgcaaatattagacttattaaaagaattgcaaaaggaaacgcaaatggcaattatgatgattacacatgatttgagtgtagttgctgagttttgcgataaagtcttagttatgtatgcaggtcaaattgtagaatttggaggcataaaagaaatactacacaatccgaaacatccttatacccaaaaattattatcaacaattccaaaacttaaagaagagcagaaacgacttgaaacgatagaaggaattgtgccatcaatccaagcatttcacgttaataagtgcagatttgcaaatagatgtaacaaaaaactggatatttgtaataatcaatctcctaaaatgcatgtttgtgaagatgtcattgtacgttgtcatttgtacaaaaatgaatataaggagatataagaatggaaaatattttagaagtcaaccaaataaaaaaatactacaaaattaaaactggattattacaaaaaactcagtacgttaaagctgttgatgacgtatcgttttcaataaaaaaaggacaaacttttggattagtaggagaatcgggttgtggtaagtcaacgttaggtaaagtgattatcaggcttgaagatgcaacttcaggctcaataattgttaatggtgaagatataacaagattacaaggtaaaaaactcagaaaatcacgacaacaatatcagatgatatttcaagatccgtatgcatcattgaatccgatgcaaatggttggagatatcatttcagaacctattttaaattataaaaaattgccaaaagaagaaataaaaaaagaagtactatatttattaaaatgtgttggcctaagtgaagatgcatattataaatatgcacatgaattttcaggtggacagagacaaagagtgggaattgcaagagcattggctttgcgtccgagtttaattgttgctgatgagcctgtaagtgcattagatgtatctgttcaatctcaagtactgaatttattaaaagatttacaagaacaatttaacttaagctatttatttatcgcacatgatttaagtgtagtaaaacatataagtgatgtcattggagttatgtatttaggtcatatagttgaaatcgcatctgataaagaaatttatgaaaatcccaaacatccatatacaaaagcgttgatttcatcaataccacaaattgataaacataataacaatagaattatattaaaaggagaattaccttcgccaagtaatccgccgcaaggttgtccttttcatacaagatgtccaattgctcaagatatgtgcaaaaaaagtatgccagaattaaaggacattggtaatgaacatcaagttgcttgtttctacgtagataaagtaggtgatttaaatgattaaattaatacttaaaagattagggttaatgatcccgttactaattttaatctcaatagttgtattttcattagcaatcatacaaccaggagatccattttcagatctacaaaacggtaaaataaaacaagaagcaataaatgcacaaagggaaaaattaggtctcaacgactcaataccacatcaatacattagatgggtcaatcatgttatacacggtgatttaggggagtcaatcaaatataaaaggccggtaattgatgttattgaggaaagaattccaaatacaatattactcggtgctatgtcattaattattacttatattatctcatttgctttaggaataacgtcaggtagatattcttacagtttgacggattatactgtgcaaatatttaattatttgatgttagccattccatcttttattgcgggagtatttgcaatttttatttttcttttgaattacaatggttcccgtttcaaggttctgttgatattaaccttaaagaaggtacttttgaatattatatgagtaaaatatatcacacatttttacctgcattcactttaggtttattatctactgctggttatattcaatatttacgtaatgatattattgaaaattctaaaaaagattatgtattgacggcaaggtcaaaaggattatctatgaataaaatttataataaacatatattgagaaattctctaatacctattattacatttttaggtgctgatattgtaagtattttaggtggagccgtgattacggagactatcttttcatataacggtatcggtaaattatttttagaatcggtaataggccaagactatccattaatgatggcattaacgttatttttctcatttttaggtttactgggtaatttgatttctgatattacttatggatttatagatccaagaattagaagtaactaggggggattagaatgcaaaataagtcaaaatcgccttttaaaattgcattttctaaatttattcataataaaattgcaatgttatcggttatttttttattaatcataactattgtatcaattatagcgccattaatagctccttttccagtgaaccaacaagatttattaaatataaaaggtgaaatgacagcacaaaacattcttggtacagactctggtggtagggataactttagtcgtttgttatatgcaggtcgtatttcattatccattggaattacatctacaataggaatgcttttgattggaattacagttggagtgatttctggttattttggaggtattgttgatacattattaatgagaataaccgaatttgttatgttatttccatttttaatatttgcaattgtattaaatgctgcacttggagataaaattaaaaatccttatggatctgccataattcttgttctagttattatcgtattaagttggggaggtattgcaagacttgttcgtggtaaagtacttcaagaaaaagaaaatgaatactttttggcagcaaaatcaattggtacacccacatataaaattattttgaaacatcttttgccgaatatattaagtgtagttatcgtacaagcaacattgttatttgccggtatgattgtagtggaatcaggattgagctttttaggattcggaattagtaaagcaataccatcttggggtaatatgttgagtgatgctcaagaaggggatgttataagtggtaaaccgtggatatggatgccacctgctataatgattacattaactatattaagtataaactttgtaggggaagggattaaagatgcttttaatcctagaggtagacgttaaataataaaagaggcactagttaattctagtacctctttattttatctcttacgtcctaaacccatcgctttttccatttttttgacagttttaaatgaaactttgtgtgctttatctctaccttgatctaaaatatcatcaagtttatctgagttatagaaactttcgtatttttcttggaattctactaaaaatgctttaactatttcagcaaggtcacctttaaatttaccataaccttcgccctcatattttgcctcaatatctttaattggcatgtctgttaatccagcgtatattgaaattaaatttgttatacctggcttgttgtcacgatcaaatttaataataccatctgaatcagttactgcgcttttaatttttttagctgcaacattcggctcgtctaataatgaaatgaagtttttagcattatcatcactcttactcatttttcttgttgggtcttgtaaactcatgacacgtccaccaactttaggcatacgaatttcaggtttcacaagcacatcattatagcgactattaaatctatctacaaggttacgagtcaattcgatatgctgcttttggtcatctccaactggaacgatattagtattgtaaagaacaatatcagctgccattaaaggtggatatgttaatagaccagcaggtataccttcaactgctttctgagctttatctttgtattgcgtcatacgctctaattctccaacagaagcaatcgtagttaacatccatcctgcttgtacgtgtgcagggacttcagattgtatgaacaatgttgctttgtctggatctataccagaagctaaataaatcgctgctaattgtctggtctgtttacgtaattttaaacgatcttgtggcattgtaattgcatgttgatctacgatacagaaataacaatcatagtcattttgcacatcaacaaattgttttagtgcgccaatataatttccaatagtaggaattccactaggttggatgcctgaaaataatgtctccatttaaatgcctactttcttagtaatattttaataattatcattataacagtatttcttaaaaatgtaagatgtgttagaatatacgtataacttactactaacaaagggattaataatcttttttataagtgtagaaacttatctgaaaaattaggtttttctcatttaattttaatgttagatagttataataaatagtaacgattaagaattttagaaaaaaatgttttttcttgatctataactaaattttaagcaatgaattttattcattcaaataggagagtgagatgtatggtaacattatttacttcaccaagttgcacatcttgccgtaaagcgaaagcatggttacaagaacatgacattccgtatacggagcgtaatattttttctgaacatttaacaattgatgaaattaagcaaatattaaaaatgactgaagacggtactgatgaaatcatttctacacgttctaaaacataccaaaaattaaatgttgatattgattcactaccattacaagacttatattcaatcattcaagataatcctggcttattacgtcgtccaattattttagataataaacgactacaagttggttataatgaggacgagattcgacgtttcttacctagaaaagttcgtacgttccaattacaagaagcacaacgtatggttgactaataaccatttaactatgtgtcatactttactaaaagatatgtcaagcaacactatttctatagtgttgcttttttggttttaattttacaataattgcttagtatcttttaaatcaaatgtgcaattgttaatatagctctatattagagtgttttggatgaaacatttgctatgataaggtaaaattaaattaagaaagtgctttaatgctttaactgtataaatcatttaaatagttttgctacaacgaatatgttattataagttaccaaaatattttagagaaagaaatcaaaaaataaattgtattttgtttgatgctttaatacaatgtggatactattcatcgactgtaaggagtgagatgatatgagaatagaacgagtagatgatacaactgtaaaattgtttataacatatagcgatatcgaggcccgtggatttagtcgtgaagatttatggacaaatcgcaaacgtggcgaagaattcttttggtcaatgatggatgaaattaacgaagaagaagattttgttgtagaaggtccattatggattcaagtacatgcctttgaaaaaggtgtcgaagtcacaatttctaaatctaaaaatgaagatatgatgaatatgtctgatgatgatgcaactgatcaatttgatgaacaagttcaagaattgttagctcaaacattagaaggtgaagatcaattagaagaattattcgagcaacgaacaaaagaaaaagaagctcaaggttctaaacgtcaaaagtcttcagcacgtaaaaatacaagaacaatcattgtgaaatttaacgatttagaagatgttattaattatgcatatcatagcaatccaataactacagagtttgaagatttgttatatatggttgatggtacttattattatgctgtatattttgatagtcatgttgatcaagaagtcattaatgatagttacagtcaattgcttgaatttgcttatccaacagacagaacagaagtttatttaaatgactatgctaaaataattatgagtcataacgtaacagctcaagttcgacgttattttccagagacaactgaataacgatattaattaagcaacgcactatgaaaggagactctttggagtctctttttttattgatttcaaaagctgaaaaagtaatagtagttaaacttacgtgtaatattttgaggtgaagatatgttagtagctttaaatgaagaaaaggaacgcgtattagcaactactgcattgagaaagacacaatatttttgtccggtgtgtggcaagcaagttattttaaagcgtgggctcaaagtaattagtcattttgcacataaacatttagcggaacaaaaatgttttaataatgaaacgattaaacattataaaagtaaattgattttagcacagatgatacagcaacaaggatgtaaagtagagatagagccattttaaaagaaataaaacaaattccggatattttgattaataataaatatgttattgagctacagtattcgccaattccttataaacagattcttcaacgaacggaaggtttaaagaaaatgggatataaagtaagttggttattaaatgatgttgattattgtcataataaagtgaagttcaatcattttcaaagtatgtttattaatccattcactcgaaaacttcatacgttcaatttagagaaaaaacaaataatgatgtttcaacaaatacaatatttaggcgggcacaaatatgtcgctgaaaaaagaaatgccaaaattagtgagttgtttaatgaggcgccttgtgattatcatgctgtttataaattatcaaagttcgcaattaatcaatatatcaaatattgtcgctggcaaaattctgttttagaacccactttaagtgcaatgtatcaattacagttaactgatcaagaagtagtgcacaattatggttatatttttccagagcaaatttatattaaaaatcatcctattgagtggcaattacaagttgatttatggttaaagaatggaaaaagcaaattagtaaatgacaatcttaattattttaaactgaaaaaatttattgttgctctagaaagtaaaacagcaattatagaaaaacttattaacaattatttaaatatttgttcagataaaggtaatgacgtgcaaattttgttctaaaatgagaaaattatatcaattatattttattaggaggtttactacatatgagtcaacaattatcgagagaagaacaggaacgtaaatatcctgaatatacatgggacttaacaacaattttcaaagatgatgaagcttttgaggctgcatttaaagaagttgaaaatgagttaggcaaagaagaacaatttaaaggacacattggtgatagtgctgagacattatacaatgcgttagaattagaagatacattaggtactaaattagaaaaagtatatgtatacgcgcacctaaaacaagaccaagatacaacgaacgacaagtatactggtatggagtcaagagcacatcaattaattattaaatttagctcggcatggagtttcttagtgccagagattttacaaattgatgaagataaaattcaatcatttgtaaattcatatgataaattacaaaaattcgcatttgatttgaagttgattaatgaaaaacgtcctcatattttagatgctgaaactgaaaagttattaacagaagcgcaggacgcgttatcaacgccatcaaatgtatacggtatgtttagcaacgctgatttagtatttgaagatgcgatagataaagatggaaatgcacacccgttaacacaaggtacatttattaagtatttagaaacagatgatcgcaaactaagagaaagtgcttttagaaatgtatataaagcatatggtgctcataataatacgcttggcgctacgctagcaggtgaagtgaagaaaaatgtatttaatgctcgtacacacaattacaaaactgcaagagaaaaagcattgagtaataatcatattccagaaaatgtatatgacaatctagtaaaaactgtacataaatatttaccattgctacatagatatactgaattgcgcaaagaattgctaggtttagatgacttgaaaatgtatgatttatatacaccattaattaaagatattaagtttgaaatgccttatgaagaagctaaagagtggatgttaaaagcattagaaccaatgggtgaagaatatttaaatgtagttaaagaaggcttaaacaatcgttgggtcgatgtctatgagaataaaggtaaacgttcaggtggctattcatcaggtgcacatttaactaatccatttattctacttaactggtctaatactatttcagacttatacacattagttcatgaatttgggcattcagcacatagttacttcagtagaaaattccaaccgtcaaattctagtgactacactatttttgtcgctgaagttgcatcaacttgtaacgaagcacttttaagtgattatatggataaacatcttgatgatgaaaaacgcttattattattaaaccaagaattagaacgtttcagagctacattattccgacaaacaatgttcgcagaatttgagcataaaattcatgcaattgaagaagcaggtgaaccattaacgccaactagaatgaatgaagaatatgccaaattaaataaattatacttcggtgattctgtagaaactgatgaagatattagtaaggaatggtcacgtattccacacttctatatgaattattatgtatatcaatacgcaactggttacagtgcagctcaaagcttaagtcatcaaattttaacagaaggtaagccagcagtagatagatatattaatgaattcttgaaaaaaggtagctcaaattatccaattgagatattaaaaaatgctggtgtagatatgacaacacctgaaccaattgaacaagcttgtgaagtttttgaacaaaaattgaacgcttttgaaaaattaatgaaagcttagtactattgtattcgcttacattatgaacagattgtgacaatttaaattaagtactattaaaaggttgaaatggtagagatagcatgttatattatgaacatgaaattaatcacataacaaacatacccctttgtttgaagtgaaaaatttctcccatcccctttgtttagcgtcgtgtattcagacacgacgtttttttatgttcttttttaataagagggaagtgaagttgtataaaaatgtattaaatatgcactttttatacattaacgattcatatatgtctattatgtaccaaatttataatttgtataattttcgaactggttaaattcgaaaaatatcactaatatatttagatcgatgtgtaacattacgttctaataatttaatgttgcaaaattaagagtcagtaaaaagacctcgttacatttatggtgtacgaggtctttaatttatttattttgatttgattttaggcattttagatttccagaaatcgccatctggatatttaagtttttcaattttttgttgaatggctaacttctttaactctttgtttaaaagtttttctggccattcataaatagtaagtaattcttccatcgttacaagttgttgttgctgtatataagtttctaatttaggaggaagattcttttcgataggtttacccatcaattcattaattatataagtatagatgtgatatgggtataatccttcgacttttaaaccttcttcatgaacatcttcactaaagaaaacgagagaaggggcttgttcgatttccatttctcttgcaatatgcaaatcaattttcaagctttcggttagtttacttttttgtaagtcgtctttaaatacttctaaatcaatacctgcattttgaatacagtcacaaatcattgattctgtaataatatctcttttaggtatgatttcattttgcattaaatgtataaatcgttcggcacgtacacgaccttgtaactcagctgctttataagctagggcgatgttatcaaagttggatgtactttgagcttggcatttcgttaatacttttaacgaaggatttaatatatgtctgatacgtatatattgattatattcaattcttaatttggataagattgctgataatttgaagcaatcggagctaaatggatcgaaaaatgaataaatttcgattttacttacaggtgatagattgatatcttcacgactcttattttccattattcgtaattctccagccatgtttattcacctacaattaattttaggaattcaccatatgattagcagttaatcttaagcgctcaaataaataatctccaacaccttgtggaaacgcagcgcgattaattgctgtctgcatattttctaaccatgcatctctttcaaattcagtgattgtaaaatctatatgtctttttcttagcataggatgtccgtgttcttcggtataaatgtttggaccgcccaaaaactgtgttaaaaattgtttttgtttacgacttgtttctgcaaaatctcctggaaacaggtgattaagtcgttcatctttttctacaagggtgtaaaaataatcaatcatatcgtataacgcttctttaccaatgatgtcatatggtgttgttgtcatttaatcacccattttcaaaaatttactgttacgaacttaagttaatatataactaatataacatgattttaaacatttgaaagaaatatgcatatttgccaatttaatttatattgtttgaaagtgtttcttttttcttgaaaaaacgttgaactttatttaaaggttgatgatgttcgaggtttagttcgtttaataaagattggaacttttgtaaaccttgattatagtctttaacttcgaactctaactcataatccgtagtatcgaaatactcacttttatctaaaaccagtaaatcacctttatatttagtttcttggcgatatgtcgttaatgcaccaagtattgataaagttgtatcttttacaccaaactgttcaactataatttgacgaatgtcatctggaagattgtcgtttgaaataatcaagttcatctctggtttaatgtcgacgatatagttgtattctaatagaccaacctttgctggtgtctttaaagtcatttcatattgattgtctttaactcttatgcgtagtgcagagcgatgttcctttaatttgaaatcgggtgtatcaatatagtaattgacttgcttaaaaagcacactgtctttaaaatatttctcttgcaatttattatagattgatgcagttatcatttgtttaaattctatttcatgatttgttgccatgatatgtatacacctcgtatcaaattcaatttatcttaactatattatgaatgacaaagttgaattttaaaagtaatttcctttatctattatcaatgttaatttgaccattaaaaatagtgttcgtaagtgttttgtattattgaattgtgttaaaatgttatggaataagaggaggattaagcatgcgtttatatattaatgaaattaaaattaaagatgacatactttattgttatacagaagattctattaaaggattatctgaagtaggacaaatgctcgttgatagtgataattatgcctttgcgtatacattagatgatggtaaagcgtatgcttatctcattttcgtacaagaaacatggacgatgttgcatgaaaacatgactaaaaaaattattatcaatgatgaactagaattgactgaattccaccaagaacttacttatattttagacaacataaaagggaataataattatggtaaggaatttgttgcaaccgttgaagaaacattcgacattgaataaagcggggtgaagcactatgaatcaatgggatcagttcttaacaccttataagcaagcggttgatgagttgaaagtgaaacttaaaggcatgcgcaaacaatatgaagttggtgaacaagcgtcgccaatagaatttgttactggtcgtgttaaaccaatcgctagtattatagataaggcaaacaaacgacaaataccatttgataggttaagagaagaaatgtacgatatcgctggtttaagaatgatgtgccaatttgttgaagatattgatgttgtcgtcaatattttaagacaaagaaaagattttaaagtaattgaagaacgagattatattcgtaacactaaagaaagtggttaccgctcgtatcatgtcattattgaatatccaattgaaacattacaaggccaaaaatttatattggctgagattcagattcgtacattagcaatgaatttctgggcaacgattgaacatactttacgatataaatatgatggtgcttatccggatgaaattcaacatcgtttggaaagagcggcagaagcagcgtatttacttgatgaagagatgtctgaaattaaagatgaaattcaggaagctcaaaaatattacacgcaaaaacgttctaaaaaacatgaaaatgattaacgaggtgttataaatcatgcgttatacaattttaactaaaggtgactccaagtctaatgccttaaagcataaaatgatgaactatatgaaagattttcgcatgattgaggatagtgaaaatcctgaaattgttatttcagttggtggtgacggtacattactacaagcattccatcagtatagccacatgttatcaaaagtggcatttgttggagttcatacaggtcatttaggattttatgcggattggttacctcatgaagttgaaaaattaatcatcgaaattaataattcagagtttcaggtcattgaatatccattgcttgaaattattatgagatacaacgacaacggctatgaaacaaggtatttagcattaaatgaagcaacgatgaaaactgaaaatggctcaacacttgttgtggatgttaacttaagagggaaacactttgagcgatttagaggcgatggattatgtgtatcaacaccttcgggttcaacggcttataacaaagcgctaggtggcgcactgatacatccttcacttgaagcaatgcaaattacagaaattgcctcgataaataatcgtgtgtttagaacggtaggatcaccacttgtattaccaaagcatcatacatgtttaatatcaccagttaatcatgataccattagaatgacgatagatcatgttagtatcaaacataaaaatgttaattcaatacaataccgtgtagcaaatgaaaaagtgaggtttgcacgttttagaccattcccattctggaaacgtgtgcacgattctttcatatcaagtgatgaagaacgatgaaatttaagtatcatatatcacaacaagaaactgttaaaacttttttagcacgacatgatttttctaagaagacagtgagcgccattaaaaataatggcgctttaattgttaatgatgaaccagtcacagtgcgtaagcaattaatgacaaatgatatattagaaattcatttaccgcgagaaataccgagtgttaatttaataccttatgctcgtaagctagaagtattgtatgaagatgcttttatcatcatagttactaaaccaaacaatcaaaattgtacgccttcgagagaacatcctcatgaaagtttaatcgaacaagtactatatcattgtcaggaacatggtgaaaatattaacccacatattgttacgcgtctagatcgtaatacaactggtattgtgatattcgctaaatatggacatatccatcatttattttctaaagtaaacttgaaaaaaatatatacttgccttgtatatggtaaaacccatacatctggtattattgaagctaatattagacggtcaaaggataggattataactagagaagttgcctcggatggtaaatacgctaaaacatcttatgaagtaataaatcagaatgataaatacagtttatgcaaagttcatttgcatacgggacgtacacatcaaattcgtgtacattttcaacatattgggcatccaattgtgggagattctttgtatgatggttttcatgacaaaattcatggtcaagtactgcaatgtacgcaaatatattttgttcatccaatcaataagaacaatatttatattacaattgattataagcaattacttaaattattcaatcaactctaattcacacagggggtgtaagtatgtcaatgaacacagatgaaaaagagcgtgttcaagaggaattatacgaccaaactttattagatcaatatttagaaaatgatgatattgatcaatttagagatgaatttctagcattacacacatatgaacaaagtgagtattttgaagatactaccgatgaaaatagacaaaagatttttcaatatttatcacctgaagaagttgcaaatttctttgatcaattagatattgatgacgatgaatatgagttgctatttgataagatgaatgcgacatacgcaagtcacatattagaagaaatgtcatacgacaatgcagtagatattttaaatgagttgactaaaccaaaagttgctagtcttttaacattgatgaataaagatgacgcgaatgaaatcaaagcattacttcactatgatgaggatacggccggcggtattatgacgacggagtatttatcacttaaagcgcatacgcctgttaaagaagcattattattggtcaaagcgcaagcaccagacgcagaaacaatatatgttatatttgtcgttgatgatgatggtaaattagtaggtgttttatcgctaagagatttaattgtagctgaaaatgatgcttatattgaagatattatgaatgaacgtgtcattagtgtgaatgtagcagacgaccaagaagatgttgctcaagttatgagagactatgatttcatggctgtacctgttatagattaccaagaacatttgcttggtatcatcacgattgatgatattttagacgttatggatgaagaggctagtgaagactactctcgtttagccggggtatcagatatcgattcgactaatgattcaatcattaaaacagcattaaaacgtttaccatggttgattattttaacatttttaggaatgattactgcgacaattttagggagattcgaaaaaacattagaaaatgtagcgctactcgcagcgtttattcctattattagtggtatgtcaggaaattcaggtacacaatctttagctgtttcagttcgtaacattacgacaggggaaattaatgagcaaagtaaatttagaattgcattaagagaagcaggaagtggtgtattatcgggtgttgtatgttcaacaatattatttacaattattgttgcaatatatcatcagccacttttagcattaatcgttgcaggaagtttaacttgtgcgatgacggtggggacgtttgtaggttcgatgattccattattgatgaataaattaaatatcgatccagcagtggctagtggaccatttattacaacaattaatgatattattagtatgttgatttattttggtttagctacatcatttatggcttacttaatttaaggaggagttatggagtttttatctttagttattgttgttttagcagcgtttttaactccaataattgtcaatcgattaaatattaatttcttgccagttgttgttgcagaaattttgatggggattgtgattggaaattcatttctaaatatagtagaaagggattcaattctaaatattttatcaacgttaggctttatctttttaatgtttttaagtggtttagaaattgattttaaagcttttaaaaaagataaacgcgcacgtcaaggacaaaatgatgatgaatcctcaattccagggcatcttaatctagcgttaactgtatttgcatttattatgattatttcgattcttttagcgtatgtatttaaatggcttggattagtggatgatgtgttattaatggtcattatcatttcaactatttccttaggcgtagttgttccaactttaaaagaaatgaatattatgagaacaactatagggcaatttatcctattagtagcagtacttgcggacttagtaactatgattttattaacggtctatggcgcaatcaatggtcaaggcggcagtacaatatggttaataggtatattagttgttttcacagcaatttcatatattttaggtgttcaatttaaaagaatgtcatttttacaaaaattgatggatggtacgacgcaaatcggtattcgtgcggtatttgcattaataatattattagtagccctagcagagggagttggcgcagaaaatatattaggtgcattcttagcaggtgtcgttgtttcattattaaatccagatgaagaaatggttgaaaagttagactcatttggttatgggttctttattcctattttctttataatggttggtgtagatttaaacataccttcattaattaaagaaccgaaattactaattatcataccgattttaatcgttgcatttatcatttcaaaattaattccagtcatgtttattcgacgttggtttgatatgaaaacaacgattgcatcagcatttttattaacatcaacattatcgctcgtgatagctgcagccaaaatttcagaaagattaaatgctatttcagctgaaacgtcaggtatattaattttaagcgcagtcattacatgtgtattcgttccgattattttcaaaaaactgtttccagttccagatgagtttaaccgtaaaattgaagttagtttaattggtaaaaatcaattaacgattcctatagcgcaaaatttaacatctcagttatatgacgtgacattatattatcgcaaagacttgagtgatcgtcgtcaattgtcagatgatatcacgatgatagaaattgctgattatgaacaagatgttttagaacgactaggtctgtttgaccgagacatagttgtttgtgctacgaatgacgatgatattaaccgaaaagttgctaaattagccaaagcacatcaagttgagcgtgtcatttgcagacttgaaagcacaacggacgatacagagttagttgattcaggtattgaaattttcagtagctacttaagtaataaaatcttattaaaaggtttaattgaaacacctaacatgttgaatttattaagtaatgttgaaacgtcactatatgaaattcaaatgttaaattataaatatgaaaatattcaattacgtaatttcccattcggaggagacatcatcttcgtgcgtattatccgtaataatgagtcgattgttccgcatggagatacacaattgcgatatggagatcgcttaattgttaccggtgctaaagaatacgttgatgaattgaagcaagagttagaattttatttttaacaataatgatattaaaatgcagacgtattttagtacgacgtaaaattaatgattttaaaatgctagtatgtatatgattttgataaataaatgctttttacgtaaatcaagtttgatacagaaaggactaaatcaaacatttatcgttgtaatacgtttaaataactttattaaaaagtcataatagtgttaaaatgtattgacgaataaaaagttagttaaaactgggattagatattctatccgttaaattaattattataaggagttatcttacatgttaaatcttgaaaacaaaacatatgtcatcatgggaatcgctaataagcgtagtattgcttttggtgtcgctaaagttttagatcaattaggtgctaaattagtatttacttaccgtaaagaacgtagccgtaaagagcttgaaaaattattagaacaattaaatcaaccagaagcgcacttatatcaaattgatgttcaaagcgatgaagaggttattaatggttttgagcaaattggtaaagatgttggcaatattgatggtgtatatcattcaatcgcatttgctaatatggaagacttacgcggacgcttttctgaaacttcacgtgaaggcttcttgttagctcaagacattagttcttactcattaacaattgtggctcatgaagctaaaaaattaatgccagaaggtggtagcattgttgcaacaacatatttaggtggcgaattcgcagttcaaaactataatgtgatgggtgttgctaaagcgagcttagaagcaaatgttaaatatttagcattagacttaggtccagataatattcgcgttaatgcaatttcagctggtccaatccgtacattaagtgcaaaaggtgtgggtggtttcaatacaattcttaaagaaatcgaagagcgtgcacctttaaaacgtaatgttgatcaagtagaagtaggtaaaactgcggcttacttattaagtgatttatcaagtggcgttacaggtgaaaatattcatgtagatagcggattccacgcaattaaataatatcattcaacagctttgttcacgttattatatatgtgagcaaagcttttttgcttttataataatcggactgatggaaaattatttgatatttcatttgactgattttttatgcacaaaaaaatcgcctcaaaagctgtagtttcaacttttgatgcgatagtatcttatattcttaaaagacatccacagaattagtccttaacattactgtttgctttatcaataatgcgttggcggtatttgaaaatattactaacaaccgttttaagtacagcatataatggcactgcaatcagaactaatgtaaagccacctaaatctcctgctgctaaaataacaacgataattgttaaaggatggatacttaaagatttacccattacatttggtgtaatgatattaccttcaagttgatgtgcaattaatgtaatgatacaaacccatataaatgtagtaggactatctataataccgagtattgctgcaggtgcaaatgataaccatgaacctaagaaaggaattaagtttgcgacaccagcaaatagtactaataaaggaatatatggtaagtcaataattgaataaccgatatataagaatatacctaaaataacactgacagttacttgaccttgaatgtaagattttaatgtaaagtttaaatcagttaataaatctacgaaaaatactttacgttcacctttgaaaaatttagcaacagctgggataaatttttcatggtcttttaacatataaattaagaagaatggaaccataatcaataagaagatggttgaaattaatgatgtaatgtactgtaatgaattagataaaatattagtaacgccatcacccattgatttaaccatatttgtaattctacttgttacatcttcaggtaatttatccatttgagctagtgcgaatttaataatttgctctgcttctttttgtagggcaggtgtctgactaattaaattgttgatatttgaaatgatgattggtgcaacaaacgcaacaattaagccgataatagcaaacaaagctaacatgattgttgttatactagcccatcttggaaaaccgactttttcaagtaagttttgaaaaggtagacagatataaaataaaaaaccactaattaaaaatggaagaaatacagaaccgatgattgtagctattggagtaaatacttcgtgcacttccataaatagtttgatgagaatgaacagcataatcagagcgatgccagttcggaaccaaaccttgtttaacataaacgatgttcctcctatttttctaaacttagttattatttagtatatcctaaatagcagtgcttaaaaaggttaatattttttaaatatacttaaattaaccattcactttctattttaagatatttactttcaatagtttgtgagacttttcaatgactcgtaagtctgcaattggatcaaacagcaccagtttatatgaataacttattttaatattaaacgtgtttaaatagtgaaatgatcatattaatatttataagaatattctgaaaaatatattgaagtgtctcgtgcttaatcgtataatatttttatgtttaaacaatagggggaatcttatgattgaaaaattagtaacctttttaaatgaggttgtttggagtaagccattagtttatggtttgctaattactggtgtgctatttacattgcgtatgcgattttttcaagttagacattttaaagaaatgattcgattaatgtttcaaggagagaagtctcctaatggtatttcaagttttcaagcgatagccatgtctttagcaggcagggttggtacaggtaatattgtcggtgtatctactgcaatatttataggaggacctggtgcagtattttggatgtggattactgcgtttttaggtgcaagtagtgcttttattgaatctacacttggtcaaatattcaagagagttgaaaataatgaataccgtggtggaccagcgtattatattgaatatggtattggtggtaaatttggtaaaatttacggaattatctttgctattgttacgattatctcagtaggtctattgcttcctggtgtgcaatctaacgctatagcaagttctatgcataatgcgattcatgttccacaatggttaatgggtggtattgttgtagttattttgggattaattatttttggtggtgtacgtagtattgccaatgttgcaacagccgttgtaccatttatggcaattatttacatactgatggctgtcattatcatttgtatcaatatacaagaagtgccagcgttatttgcattaattttcaaatcagcatttggattacaatctgcttttggtggtatcgttggcgcaatgatagagattggtgttaaacgtggattatattcaaatgaggctggtcaaggtacaggtccacacgcagcagcggcagcagaagtatcacatccaagtaaacaaggtctagtacaagcattttcagtttatattgatacattatttgtatgtactgcaactgctctgattatacttatttctggtacatataatgtgactgatggtacggttaatgcgaatggcacaccgcatttaattaaagatggcggtatttatgttgaaaatgcaacaggtaaagattattcaggtactgcgatgtatgcacaagccggcattgataaagcgttccatggcagtggttatcaatttgatcctactttctctggcgtaggttcgtactttattgcatttgctttattcttctttgcatttactacaattttgtcgtactactacattacagaaacaaatgttgcttatttaacgcgtaatcaaaataatcaagtttcatcgatatttattaatattgctcgtgtgattattttgttcgctacattttacgatgcagttaaaacagctgatgtagcatgggcattcggtgatttaggtgtaggtctaatggcttggttaaatatcattgcgatttggattttacataagcctgccgtaaatgctttaaaagattatgaaattcaaaagaaacgtttaggcaacggttataatgcagtttatcaacctgatccgaataaattacctaatgctgtcttttggttgaagacgtatccagaacgtttaaaacaagcacgtgccaaaaagtaatctacttttgtttatagtatatgtagtgatcatttgataaaaaagaaaagtattgagaattttaggtgctcagaaatttgaattttaaaaatatagtgtctcttggtacaataacaatacaactactaggggcacttttttatgtcagaatttaaaactggtaagattaataaacatgttttatatagtaatattttaaatagagatgtcacgttaagtatttatttaccagaatcttataatcaacttgttaaatataatgtcattctttgctttgacggattagattttttacgtttcgggagaatacaacgtacatatgaatcgttaatcaaagaagcgcgtattgatgatgcgatcattgttggattccattatgaagacgttgataagcgtagagaggaatttcatccacaaggaagtcgttctcatttaactattcaatcagtcggtaaagaaatattgccatttattgactcgacgttttctacactgaaagtaggtaatgcaaggttattagtaggggatagtttagcgggtagtattgccttattaacggcgttgacctatccaacgatttttagtcgtgtagcaatgttaagtccacattcagatgaaaaagtattagataagctaaatcaatgtgcaaataaagaacaattgacaatttggcatgtcattggtctagatgaaaaagattttactttaccaacaaatggtaagcgtgccgatttcttaacaccgaatagagaattagctgaacaaattaagaaatataatataacttattattacgatgaatttgatggtggtcaccaatggaaagattggaaaccattgctgtcagatatattattgtattttttaagtaaaaacacagatgatcaactttatgaataatttacattagtagatttagtatgaattgtcttcatatagtctggtctataatataatttataaaagattttactgtttaatttaatttaaatttgacgaaattgcaaaagatgtataatgaattatttttaatgtaacggttttcaaagaaatttgatataatagcaataggttaaacaaaggaggaattcagatgattttaggattagcattaattccatcaaagtcatttcaagaagcggtggattcttaccgtaaaagatatgataaacagtattcacgaattaaaccacatgtgacaattaaagcgccatttgaaattaaagatggtgatttagattctgtcattgaacaggttagagctcgtattaatggtataccagcagtagaagttcatgctacaaaagcttctagcttcaaaccaacgaacaatgtgatttactttaaagttgcgaagacggacgacttagaagaattgtttaatcgctttaatggagaagatttctatggagaagctgaacatgtttttgtgccacactttacaatagcacaaggactatctagccaagaattcgaagatatttttggtcaagtagcattagctggggtagaccataaagaaattatcgatgaattaactttgttacgttttgacgatgacgaagataaatggaaagttattgaaacgtttaaattagcttaagtaacataatagtattgttaatcgtagtatgtttgaattaataagaaaatggtcatttttattgaatgtaataaaaatgaccattttctttattttaaaatacgttttaaccttacttagctttttctctatttactataaagtagcttccataaaatacagctaagactaaaaagattaatgccgagaaataaaatgtattgtttaaattgttggtaaattgtgtaattaatccgccaaataatggccctatcattgagccgaatccttggatactattaaaaacaccccaagtttcttcttgttcatctgatttgataaatcgtgccataaaggtattccatgctggtaataagatgccatacattagaccgatagctaaagcgataatccacaagatgtgaatattaacaatcatagatagagtaaaaattaatatcatgtataaaataaatccgcttagaataacaccatacataaagtttctgctgcggttatctattagtttcgataaaaatagcatcgaaactgcacagccgataccaccaataatgattgcaacagtatattcaattgtgcttacgttaataaccttagtagcatatgttggtaatataggaactagggcagcaattgcggcaccttgtaaaagaataccagggaacaacaataaatggcgctttgtcacatcaacaatttgtctcaattgagctttaactggacgagtattataatttgttaactttacatcgacaaaataatataatatccatgcaattaaaacgactaaagacatcatgaaggcaaagcgtgttgggtgcactttgataagtagattcataaaaaccatacctaccaataggcctaacaaccatgaaaaataaacatagcccatttgtttgccacgtttatcttcttcaacactggataacataatgacccaaataggactaactgcaataccgagcatcatagcactaaatatgattacaaaaggtgatgctggaaaccaaataactaaaaataaacttgtaaatgctaaaataaatccagtcgttaaaacgatttttgtgccgaattttttcagtaaaaatcctataacaaagtttgtagatgcatcagcaataaaatgtattgaaaatgctagagacgttattgctacagcaatggatgtaactgttggcaagaaattaatatagcttaggatatacatgcctctcgcaaattccattaaaaataagataataagcattaaaatgaaatttttatgattagcgtaattatttaacgaagaatcttgcatataaaggaacctttccataaatctcttgtggttgtgatgaatgaccgattaaatcaagtaagtctcgacatattgtctgtgtagcatacttaattttatcttgttccattgtactaatcatgttagttaattgctcattaccgttagttaaacttgctacaatttttattgcttcttctggagtatcagcgattttaccaaaacctttttcttcaaagtaaagggcattttcaagctcttgaccaggtgcaggatttaggaaaatcattggaatacaacgggcgaaaccttcagttattgtgataccaccaggtttcgtaatcataagttgacttgatgccatccattcattcatgtgtttggtataacctagaatcaatacattctcgttagatttaaacttagctgttaaagaacgctttagctctttgctcttaccacaaatcataactacttgtgcatttgcacttttcgctaatatatcagtaatcatcgtgtcaaaacctttagatacaccaaatgcaccagctgacattaaaatagtttgcttatctggatctaagttgttgtctattaaccactgcttttgattaataggcgtttcaaatttgttatcaataggaatacctgtcactttaactgttgaaggatcaatacctacgtctatgaagtcttgtttcgtttcttttgttgccacataatatcttgttgaatacggcgtaatccagtttttatgtaagcgatagtctgtcatcactgtagcaactggaatattaatgttaaattgctcagttagtaccgacataactggtgtaggaaacgttaataatattaaatctggcttttcttttatcaataaattaattaacttattaagtccatagtatttgtaaaaacatttgtctagtttatctgggcggctgtaataaaaccctttgtacatatttctaaaatatttaaagctattgatataccattttttacaaatagaagtcaaaattggatgagcttccataaataaatcgtgctcaatgacgcttaaatggtctagattcatatcattaagttgattaacgatactctgtgtaacttgcatatgaccgttaccgaatgagccagtaataatcaatatctttttattttgagtaaccattaatagccaccctccgttagtttgaaaattttatttaagtgtaacttattttacggcattataaaagaaataaagacgcaaagtcgttacatttatagcaattttaatctatagatgaattgatacaaaataaaacgttattttataaagcaatttattgttctatgttttatttgtatatttaaaattatccagtatacaattatagcatatttttggaaacaattatgatattataccatgttacaagatggttttaataatttaagatgagccataattgtaaaactaattcataataccgtatgttttatttttaatagtagaaattagaaaatgctgattagtaggatataacagtgaaattataaatttattaacatcaacaaaacgtgtataataaacatattgtagaaaaaggagcggttcagtttggatgcaagtacgttgtttaagaaagtaaaagtaaagcgtgtattgggttctttagaacaacaaatagatgatatcactactgattcacgtacagcgagagaaggtagcatttttgtcgcttcagttggatatactgtagacagtcataagttctgtcaaaatgtagctgatcaagggtgtaagttggtagtggtcaataaagaacaatcattaccagctaacgtaacacaagtggttgtgccggacacattaagagtagctagtattctagcacacacattatatgattatccgagtcatcagttagtgacatttggtgtaacgggtacaaatggtaaaacttctattgcgacgatgattcatttaattcaaagaaagttacaaaaaaatagtgcatatttaggaactaatggtttccaaattaatgaaacaaagacaaaaggtgcaaatacgacaccagaaacagtttctttaactaagaaaattaaagaagcagttgatgcaggcgctgaatctatgacattagaagtatcaagccatggcttagtattaggacgactgcgaggcgttgaatttgacgttgcaatattttcaaatttaacacaagaccatttagattttcatggcacaatggaagcatacggacacgcgaagtctttattgtttagtcaattaggtgaagatttgtcgaaagaaaagtatgtcgtgttaaacaatgacgattcattttctgagtatttaagaacagtgacgccttatgaagtatttagttatggaattgatgaggaagcccaatttatggctaaaaatattcaagaatctttacaaggtgtcagctttgattttgtaacgccttttggaacttacccagtaaaatcgccttatgttggtaagtttaatatttctaatattatggcggcaatgattgcggtgtggagtaaaggtacatctttagaaacgattattaaagctgttgaaaatttagaacctgttgaagggcgattagaagttttagatccttcgttacctattgatttaattatcgattatgcacatacagctgatggtatgaacaaattaatcgatgcagtacagccttttgtaaagcaaaagttgatatttttagttggtatggcaggcgaacgtgatttaactaaaacgcctgaaatggggcgagttgcctgtcgtgcagattatgtcattttcacaccggataatccggcaaatgatgacccgaaaatgttaacggcagaattagccaaaggtgcaacacatcaaaactatattgaatttgatgatcgtgcagaagggataaaacatgcaattgacatagctgagcctggggatactgtcgttttagcatcaaaaggaagagaaccatatcaaatcatgccagggcatattaaggtgccacatcgagatgatttaattggccttgaagcagcttacaaaaagttcggtggtggccctgttgattaataaaagatttattgatgaaggtaaaactattgatgtttatttattcgaagcattaaataaccagataatcattgctataccagattggttttggtcatatcagatggcaatgacattagatgaagaaacttgttttgaagcaatactcatgcaattgtttgtttttaaagaagaggaagaggcagaatcgattgcatcacaactaacagattggatagaaacatataaaaaggagaaagactaatgaacttaaagcaagaagttgagtctagaaagacttttgcgattatttcacatcccgatgcagggaaaacaacgttaactgaaaaactattgtacttcagtggtgctattcgtgaagcgggtacagttaaagggaagaagactggtaaatttgcgacaagtgactggatgaaagttgaacaagagcgtggtatttctgtaactagttcagtaatgcaatttgattacgatgattataaaatcaatatcttagatacaccaggacatgaagacttttcagaagatacgtatagaacattaatggcagttgacagtgctgtcatggtcatagactgtgcaaaaggtattgaaccacaaacattgaagttatttaaagtttgtaaaatgcgtggtattccaatctttacattcattaataaattagaccgagtaggtaaagaaccatttgaattattagatgaaatcgaagagacattaaatattgaaacataccctatgaattggccaattggtatgggacaaagtttctttggcatcattgatagaaagtctaaaacaattgaaccatttagagatgaagaaaatatattacatttgaatgatgattttgagttggaagaagatcatgcaattacaaatgatagtgattttgaacaagcgattgaagaattaatgttggttgaagaagcgggtgaagcctttgataatgacgcgctgttgagtggagacttaacacctgtatttttcggttcagctttagctaactttggtgtacaaaatttcttaaatgcatatgttgattttgcgccaatgccaaatgcgagacaaacaaaagaagacgttgaagtaagcccgtttgatgattcattttcaggatttatctttaaaattcaagccaacatggaccctaaacaccgtgatagaattgcctttatgcgtgtcgttagtggtgcatttgaacgtggtatggatgttactttgcaacgtactaataaaaagcaaaagatcacacgttcaacgtcatttatggcagacgataaagaaactgtgaatcatgctgtagcaggcgatatcattggactatatgatactggtaattatcaaattggagatactttagttggtggaaaacaaacctacagtttccaagatttaccacaatttacgccagaaatttttatgaaagtttctgctaaaaacgtcatgaaacagaagcatttccataaaggtattgaacaattagtacaagaaggtgcgattcaatactataaaacattacacacaaaccaaattattttaggtgctgttggtcagttacaatttgaagttttcgaacatagaatgaaaaacgaatataatgttgatgttgttatggagccagtaggccgtaaaattgcacgttggattgaaaatgaagaccaaattacagataagatgaacacatcaagatcgattttagtgaaagatagatatgacgatttagtattcttatttgaaaatgaatttgcaacaagatggtttgaagagaaattccctgaaattaaattgtatagtttactttaacagctcaattgtataatcgaatttgttacattaaaaataattgtttcgttgaagaaaaataaattgtatattttaaaagaaaaaggtatactatgatgtatcaaatgaataacctatggcattttgtcagaggggagtaacttaagaatcatgaccgtataaatgattcgacactttatcgtcattacgaagatatcttccggtaaagtgggcaatttaaattgcttagtgagacctttgctatttatttagcataggtctttttgtttgtacttaacttatttatttaaaggagttgtacatgttaatggatccaagtttgatcttaccttatttatgggtacttgtcgttttagtatttttagaaggcttattagcagcagataacgcgattgttatggctgtaatggttaagcacttaccacccgaacaacgtaaaaaagctttgttttacggtttgttaggtgcatttgtatttagatttttagcattattcttaattagtattatcgcgaacttttggtttattcaagctgcaggagcggtttacttaatttatatgtcaatcaaaaatctgtggcagttctttaaacacccagaaattgaaagtcctgaagctggagatgatcatcattatgatgaatctggtgaagagattaaagcaagtaacaaatcattctggggaactgtgttgaaaatagaatttgcagatatcgcatttgccattgattctatgcttgctgctttagctattgctgtaacacttcctaaagttggtattcactttggtggtatggacttaggtcagttcgtagtcatgttcctaggtggaatgattggtgttattctaatgcgttatgcagcaacatggtttgtagagctattaaacaaatatccaggacttgaaggtgcagccttcgcgatcgttggttgggtaggtgttaaattagttgtcatggtattagcgcacccagacatcgctgtattgcctgagcacttcccacatggcgtattatggcaatctattttctggacagtactaattggattagtaattatcggttggttaggttcagttgttaaaaataaaaaatcgcataaataattgatgtgaagcggacaatcttaatttagtttaaggttgtcctttttcatttaattgagtgatttatgaaaaatggattttgaagaatgtgaatcaaaagatgcgatatagtattaagaaaatgtgccttttatatttagcattttttcaatagaaattatatagattttaaagcaaattaggtgttaatgtgtcataatgataagtgattttattgaatggagtggacattagtggatattggtaaaaaacatgtaattcctaaaagtcagtaccgacgtaagcgtcgtgaattcttccacaacgaagacagagaagaaaatttaaatcaacatcaagataaacaaaatatagataatacaacatcaaaaaaagcagataagcaaatacataaagattcaattgataagcacgaacgttttaaaaatagtttatcatcgcatttagaacagagaaaccgtgatgttaatgagaataaagctgaagaaagtaaaagtaatcaggatagtaagtcagcatataacagagatcattatttaacagacgatgtatctaaaaaacaaaattcattagattcagtggaccaagatacagagaaatcaaaatattatgagcaaaattctgaagcgactttatcaactaaatcaaccgataaagtagaatcaactgaaatgagaaagctaagttcagataaaaacaaagttggtcatgaagagcaacatgtactttctaaaccttcagaacatgataaagagactagaattgattctgagtcttcaagaactgattcagacagctcgatgcagacagagaaaataaaaaaagacagttcagatggaaataaaagtagtaatctgaaatctgaagtaatatcagacaaatcaaatacagtaccaaaattgtcggaatctgatgatgaagtaaataatcagaagccattaactttaccggaagaacagaaattgaaaagacagcaaagtcaaaatgagcaaacaaaaacctatacatatggtgatagcgaacaaaatgacaagtctaatcatgaaaatgatttaagtcatcatataccatcgataagtgatgataaagataacgtcatgagagaaaatcatattgttgacgataatcctgataatgatatcaatacaccatcattatcaaaaacagatgacgatcgaaaacttgatgaaaaaattcatgttgaagataaacataaacaaaatgcagactcgtctgaaacggtgggatatcaaagtcagtcaactgcatctcatcgtagcactgaaaaaagaaatatttctattaatgaccatgataaattaaacggtcaaaaaacaaatacaaagacatcggcaaataataatcaaaaaaaggctacatcaaaattgaacaaagggcgcgctacgaataataattatagtgacattttgaaaaagttttggatgatgtattggcctaaattagttattctaatgggtattattattctaattgttattttgaatgccatttttaataatgtgaacaaaaatgatcgcatgaatgataataatgatgcagatgctcaaaaatatacgacaacgatgaaaaatgccaataacacagttaaatcggtcgttacagttgaaaatgaaacatcaaaagattcatcattacctaaagataaagcatctcaagacgaagtgggatcaggtgttgtatataaaaaatctggagatacgttatatattgttacgaatgcacacgttgtcggtgataaagaaaatcaaaaaataactttctcgaataataaaagtgttgttgggaaagtgcttggtaaagataaatggtcagatttagctgttgttaaagcaacttcttcagacagttcagtgaaagagatagctattggagattcaaataatttagtgttaggagagccaatattagtcgtaggtaatccacttggtgtagactttaaaggcactgtgacagaaggtattatttcaggtctgaacagaaatgttcctattgatttcgataaagataataaatatgatatgttgatgaaagctttccaaattgatgcatcagtaaatccaggtaactcgggtggtgctgtcgtcaatagagaaggaaaattaataggtgtagttgcagctaaaattagtatgccaaacgttgaaaatatgtcatttgcaatacctgttaatgaagtacaaaagattgtaaaagatttagaaacaaaaggtaaaattgactatcccgatgtaggtgttaaaatgaagaatattgccagtctaaatagttttgaaagacaagcagttaaattgccaggaaaagttaagaacggtgttgttgtagatcaagttgacaacaatggtttagcagatcaatctggtctgaaaaaaggtgatgtaattactgaattagatggcaaacttttagaagatgatttacgctttaggcagattatatttagtcataaagatgacttgaaatcaattacagcgaagatttatagagatggtaaagagaaagaaattaatattaaactaaaataatgttgaggtgaacaacgtgtcaatttttagccagtttttaaaaagatcaagccctcaacaaggtattgtattgtactatatcgtcgcaattgtcattgcatttttattattaaacttaccgtatgttcataaaccaggtgtagaagtaaatccaattgacacattatttgttgccgtatccggaattagtgttactggattgtctccgataagtattgtcgatacctattctacatttggacaattaattatcctcgtgatattaaatattggtggaattggcgtcatggcaattggtacgatgttatgggtggtactaggtaaacatattggaattagagaacgtcagttaattatgttagataataacaaaaacacaatgagtggtaccgtcaaattgattattgatattgtaaaatcaatatttgtaatcgaactcgtaggagccatgttattagcattttacttttatcgagataatccagatttaaaatatgcaatcatgcaaggtgtttttgtttctatttctgccactaccaatggtggattagatattacaggtaagtcattaattccttatgcacatgattattttgtacaagcgatagttatatttttaataattttaggatcaatcggcttcccagtattattagaagttaaagcttatattcaaaatagggttactaattttagattttcattatttactaaaattacgacatcaacatatttattcctatttattgttggggtattagccattctattatttgaacataaccatgcgttcaaaggtttaagttggcatcaatcgttattctattcgctgtttcaatcagcgactacaagaagtgcgggtcttcaaacaattgatgtgacaacactaagtgaccccactaatattatcatgggtattttaatgtttataggatcttcgccaagttcggttggtggcggtattcgtacaacaactttcgctattttaattttgtttttaattaactttagtaataatgccgataaaacatccattaaagtttacaatagagaagtacacattatggatattcaacgttcatttgcagtatttacaatggcgacaattttaacatttttaggaatgctaattatatcagctactgaaaatggtaagcttacatttttacaagtattttttgaagtcatgtctgcatttggaacttgtggactatcgcttggtgtcacaagtgatattagtgatatttctaaggtcgtactaatgatactcatgtttataggacgtgttggcttaatatcatttatcattatgatagcaggacgtcgagaaccagataaattccattatccaaaagaacgtattcaaataggataatataatagcaatctaagtttagttaatgtagattttaactggaacttagattgcttttttagtttgtatttttaacttattttataagacgattggtttcgaaaatggtaaactagtaacaatgagaggtgtaacatgatggaaaaaaatgaaaacattaatgtagagattttaactacgtcagatatgcatagtcatttcttaaatggtgattatggttcaaatatttatagagctggtacttatgttaaccaagtaagagcacaaaatcatcgcgtcattttattagatagtggcggaagtttagctggctcgttagcggcctattattatgctattgttgcaccttataaacgacatccaatgataaagttaatgaacagaatgcattatgatgctagcggtgtgagtccaagtgaattcaagtttggtttatcatttttaactcgttcaattgctttggcacgttttccatggttatcagcaaatattgaatacaatgttactaaggagccttatttttcaactccatattgtattaaacattttggtgacttaaaaattgctatcgtaggcgtcacagcagatggtttaatggaaaatgagtattctgaaatggagcaagatgtatctattgaaaagacattagtggcatcaaaacgttggattagatatatccatgaagttgaagagccagattttttgattgtaatttatcatggtggattgaataaaattagtaatagtacgaaaaataaaaaggcaagttcgaatgaagctgaaaaattaatggaagaactcggtgttatagatttaatgattacagctcatcagcatcaaacaatagtaggtcaagatcatgaaacgtattatgttcaggctggtcaagatgccaaagagcttgtacatctttcgattaattttaaaaagagaacaacaacttatgatgttgaaagcattgattctaaagtgattgacttaaatgagtatgaagaggatcaagaattattagatttaacattctatgatagaaaagcagtggcttattggtcacaggaaatcataagtgataaaggtttgatgttatcagtaaatgggttacaagatttagtctgtcaaacacatccattttcgcaattattacatgatgcaattcaccttgcatttgataatgatataacatgtgtccacgtgcctatgaacggagagaaggggttgagtggacagattcgaaatgaagatttgtatcatgcatacccatatccagataagccaatggatatgacaattagtggtcaaaatatcaaagatatattggagtatagttattcacatttagattttgttaacgagcaattaagcttaacaattattgatgaaacgttatgtacaatgtggcaaggattcaattatgagattgatatgaatcaagaacctgggcaacgagtaatgttagatcaaattgatttgactaagagttatagagttacaatgactgactattgttatcgtaactacaagaattatttaaaaaatgctattatacatgaatcatacgatgaaacaatgagtacattaattgcagagaagttaagagatccgaattatcgtatttcatgtagtgataattttatagttaaaaacaggtaaatattgctatgtaataaattaattataagttcaacaagtataaaaacctttcttagagaagattatctaggaaaggtttttagaattttaaaattgatataaaagaacagtgaaattctcattcattatatataagtaaacaaaaaagctaaaatggtatataccattttagcaagtaacggaaacggagggattcgaaccctcgcgccgctttcgcgacctacacccttagcaggggcgcctcttcagccaacttgagtacgtttccaatggctccacaggtaggactcgaacctacgaccgatcggttaacagccgatagctctaccactgagctactgtggattaatttgtatgtgtttgaatatcaagcacaaatattattataacaagattaagttaatttgcaatagataccttaaaaaaatatgcagaacatttacactatatttataaaacattccgcatattttaaaaataaacaatttatttatcttcaaataaagaatagcgtgtcaatgcttcaaacacattcaatgtggctttattataatctattggttggtcgggattttttgatatcatgcgagattgtttatctaccatgtaatagtaaaaaatggaattgttatattgatgccataaactgtggtatgaaacatgaagaatgattgattcattattaataaatgtcactttacatttacgattttttaattctttaatactttcgatataatgcatatttaaccaaatattttcattttgtctgtcagaatgtgttgggaaaaaataagttggaaataatggtgttagtaaaataggtggtttactagaaatgccagtaatgcggtttgtctctgctttcttgccaagataagtattaccataaaatttgcaagagcgttcaatgattttctggactttaaaaggattttgaatacgcgttttgtcaaaccgaattatttcactaccgtttctttgatcgtcatcatcaaatgctggtcgaataaccatgtctcctttgcgtatcacataaatattttgagaatacataagcaaaacctcgctttattaagttttaaaccattaatataaaaatacaattaatgatataaagatattttataataaaattctgagttgtcaagttattattttggtgaaaatgtacaataatttttaactaatagtcagaatattcattgatttcaaaattagaaaaatgtatacttattataaattaaagaaaggtagtggtttctatgaaatacaatactaatgttaaacatacaactttagaagcgtttgtcacaactgtcaatgatttgggtattgaattaattatcaatgaagcacttcgagaggtaagaaaacgacagctcatagaacttatagatgacgcactcgtcaataaagatgaagcagcatttaatcaatatacggcagaatacaaaaatttggaggcatttctcggtgaataacattgattcgaattccataacgcaatcataaaaggactattcttaacatctcatacatgtaagaatagtcctttaatcgtttatgacattaatctaattaattcatgtctatctatgtcaccgaaataatgatataaatcatattctgatagtgcttcttctatgtgctcaaagtcgtgtagacagccaactaatgcattttcaagatcagtgacatctccgacaccaaagaaatcaccgaatatttttgcatgttcgattttacctcgtttaacatcaaacttaatttgtacaaatcctttttcaaatttttcctcgcgttcaaagttatatttagggtttctaccataattccattcccaagttctatatttgtcgttacttaacttttcaatattttcccaatcttcatccgttaatttatattcttctacttcagtttctccaaagatagttttcaagatgatttttttaaattcttcaatttctaaagggtcatttaaaaattcttgaatgtttgctacccgtttacgaacagatttaataccttttgatttaatcttagctggattaacttttagtgcattctgaacttcgtctaaatcactatttaacatcaacgtaccatgactaaacattctatttttaactttaaccatagcattccctgagattttcgcttgtccaacttgaatatcgttacgaccagttaattcagcatttacgcctaaagattgtaatgcttgaacaattggttcagtgaatttttggaaattgtggaaactgttaccatcatcatctgttataaaactaaagtttaaattgccagtatcatgataaacagcgccaccaccagaaattcttcttactacatcgatgttgtgagcatcgatatatgtctgatttacttcctctatcgtattttgattctttccaacaatgatagatggtctatttatgtaaaataaaaagtaactttcttctgctggtaaattttttaaaacatattcttccattgctaagtttaaagttggatctgtaatattattattactaatgaatttcattacaatctctcccttatatctatatatattctctacttatttatgccttaactttgctcaaaatgccaattatatactcacaaatcattctaaatatcggcttaaagttacattttattatttttgattgttaatagtttatttgttaagtgaattttagtacaatataatttagttatgatttaaggaggacttaaaatgactgttgcagaagtgggtaacattgttgagtttatggatggattaagaggtcgtgttgaaaaaatcaacgataactctgttattgttgacttaacaattatggaaaattttaatgaccttgatttaccggaaaaaactgttatcaatcataaacgatataagattgttgaataagaaggtaagttataatgaataaaatctcgaaggctttaacttggtttattataagtttcattatatttcatctcatattatttattatgtggggcgaacaccaagaatactggtatttatatacaggtataatgctaattgctggtatcagttatgtattttatcaaagagatattgaatctaagcggttgcttacatcaattggtgttggtattattacggcaattattttaattatgcttcaacttttattctcacttataacttctaatttaagttatagttcattaattaaagaattagcaagaacaggtgtcaattggaagtggcaaatgttagtaactttactttttgtcattccatgtcacgagttatatatgagaactgttttacaaaaagaattaacacatttttcaataccgaaatgggtagctatattaataactgcaatttgttctagttcattatttatttatttagataattggtggatagtaacatttatatttgttgcacaagtgatattatcattaagttatgagtatactcgacgtatagcaacaacatccgttgcacaaattgtagctattatattgttattaatttttaatgcttaaataagcttttcttagacgtatgtgttctaagaaaagcttttttgcttaagaatagcaatacgaagattcgaggcatgcttcattatagtggtaatattttttaacagcaagcggttattattgagattaggttttagtcagtttttattactaaatattttataaaaatggtataatatttttgagcaagttgaattgatggtggctatctgagtaaaggggggtggtgcctatggcattacttaacacttttgaaaggaaaagcctattgtgatatctattgcaaacgcattacatttaatgttaagtttcggtatgtttatcgtcactttcattggtatagtagtagcaataataaatttaagcaataaaaaataaccatcatttcaaaactttgacatagaatgatggttaaagaaaatctcatttagtcaccgtctttttaacgggctcattaggcgacatgttcctgcatgtcgtctttttacatttttatagtaacatatcttttatttaattgtctatttttattagatgtgtaacaaaattttgaagtattttccgtatattgcctgctaaacatgtcagatttgaaaggaaaatcatactgtggtagaaatcaattatgattatatggtagtacttataaataagtgatttctattgaatatgtaatgaagttcatatattaatataactttcattgatatagaagtcgcaatgattaatttaaacaataaaaaacaaccatcatttccaaactttgacaacgaatgatggttaaagaaaatctcatttagtcaccgtctttttaacgggctcaataggcgacatgttcctgcatatcgtctatttatacactgcacaatttaataataatacaattatactttgatgtccatttaacataaagtggttgaaatttgcagcaaataaattaaccttgactattttcagaaaattctgtataaataacgaaaaagagatatggattaaatatgaagaggtgtttttatagaagaataaaatttttggcactatattatatttaactttagcacttggattatcaacagcagcttatgcatctacagaatacgcagaaggaggcacttggagtcatggtgtcggcagtaagtatgtttggtcgtattattatcatggtcataaaggacatggtgcaacagctattggaaaatatagatcatttagtggttatacaagagctggtgtaaaagcaaaagcatcagctactaaacataattggtgggtcaatagagcgtattataacatttattaaatactaaaaaatcatagaaaataaacaacgcaagaggtacaacatgaaatggttcaaattaatacttgatgttacaatcttcattctgattgctatattgttatttgtttatacatataaagaaaacgaagaaatattgcctgatactaaataccctatagcggtaactgactggaataaaaaatatagtaaaaatgagatttataaacgtatagatcaattcgctaaaaatgagaacgtagcaatctataaatcaacttcaaattatacaaacaaaaacgtagataaagatatatatgtatttaataaatcaaaagcagcaactatcactccttttaatgctaaatataacattcattatttaagtgacgacgaagtattaaaaaaagatatcaaagggagttattttgtaaaagacaaaaattttgacgtgtctaaattcataaattttttaaaagaatatggtgttactgctgaatcatacaaaatagatcatatgatgattgccgttggtgtcattaaacaaatgaatatagtagttccattatcctcacttttaatcgtttattttatttattatattttcgaaaagaacattaatttcaaagcgtatgcgattaagtatttaaatggttttacattaagaaaaataattttcgaaaatttttcaaagaaatgcacgtattgggtaacgttaatcataactcaaattcttttaactacaagtgtactttggatattaaattacacgggtaatttagatttattcatattaagaatagttctgctttcatgtcttttcattttaacgattagtgttattaatttatggactttcttaatgttactaaatttaaatattgcaaatatgattaaaggtaagcagcactttaaaacaattcgttttattaatacagtttgtaaaagtattctcttagtactaatagctaatgtaatgatagaaaatactagtgttattaaagatttgaataaaataaaagaaactgagaaatattggaatgtattagatgattattacacgattgaatttgcaccttatcacgaaacaaaacaaagtttgattgataatatggtgcgatcagaacaattagtaaaggctagtgaagcagaaaataatgcgattttattcaaaccaaagggtgactccgttgacaatgacaacttttcgcctgatgaggggaatgtaatattagtaaataatcagttctggtcgatttattacaagcagtttcaacctgatattccgataaaaaatcaaaaaaataatgtcgaagtaattattccacaaaagtttcatgcaatgcgtaatgaaatcaatcaagcatatcattcatggtttgaatttgtacaaaataaaaataataaagagaataagttatctatacagtttatcaacaaaaatgattgtcgaattttttcatttgatgcacgagatagtcgccatttgtcatttatagaggcgccaatcattgtgaatgttcaggcatcagatttatcgaatgatttttattatgccatgatcagtcaaggcgggtatttattcaaaaattatgacgcgctagtaaaaaatattgaaaagtatcatcttgatggggaaatcagtggaataaccaattataaagatagcgtgatggaaatgtatcatgaaaacaatttgaaattaacagtactcaacttttcacaaatcattatcgcaatcattttaataattattattttatttgatgtgaaatattattttgaacagcatcgaaaattactcgtaatcaaaaagctatatggttattcaacattaagagccaattaccaatacttattaataaataatatagttgttatttttattggaatattgacgaatgtaattttacattctcactatataatgatgttatttgcaacgattcttgtcgttcaaatattattgcagatttgcagcctatactatcatggccgacgttttaatgaagttatcaaggagttttaactatgaaatttatcattgcaatattattaggattaatattatccattactattgcttttacaatcatacatcatcctatacttgatcgttttaatcctttcttaaaaacggagtatagttatgccaaagtgccaaaaggtacgcaacaatatgttaatattacggcttatagtgaaagaggggaaaagcttgattataaattaacatttaatggattttcacctagtagaacgtatgtcgaaataaagcataaagggcaatatgtcatatcgatcacatatgttgaaaaagaggatacaccaaaagaggtaagacaagaatgatagaattaaaagatttaaccatacaaaaaggtaatacacatattttgaagaaacttaatttgaaatttcaatgtggaaaatcatatgcacttattggtaaaagtggatgcggtaaatctacattattaaatactattgctggacttgaaaaaacaggaaaacaatatgtctattttaatggtcaattagaacaatttaaatctaatttttacagagataaattaggatatttatttcaaaattatggattaatcgataatttgacagtaaatgaaaatttagatattggattagcatataaaaaaataagtaagaaagaaaaagaacaaataaagatacgttatatagaacagtttggtctgtcaaacagtttaaaaagaaaagttcatacgctaagtggaggtgaacaacaacgtgtcgctttaattagaatgatgttaaaagatccgattgttatgttagctgatgaaccaacgggtgcgttagatcctaaaacaggacagatgattattcaatcattatttggtttggtcgatgaaaataaagtgctgattttagcaacacatgatatggctattgcaaatcaatgtgacgaaataatagatttagaacagtatagaaaagtagcatctatgtgatatccaaaagataaaattaaaagccaatcaatgggaaatgttgacttcaacactccgtttgattggcttttatactgtgttactaagttatgaaagtaacaacggcaaactgaaaaaaagcaatataataatatttaatacgattagtaataaatgtaattgatttttcgttttaatatagcaaaaaacaatgactaaagataacaacaatatcatgattgcacctgggaagaaccataatgctgaagctgtgtaccaaatcattggtaacgccataataataaaagatataagacaagaaaggataccaataatattataagttctagtcaaaattacacctccaattttcactttaaaatgacatgcgtaaaacaatcattttaaatacattatacaataaaattaaattgtgcggtagaagaatttgaaattaaattgaattgtttttggtagttggtatatttataacactctgcaaaagaatgtagcaaaattagataaattagattatttaaaattatgcgtgatattattatttttatcatgcaaataattataataacaatatttaattattgtatttacagttgattaatagcgttgtgaagtataaaattattttgtaaaacaattttgttattaagaggtgcgctatggaaaaggggattttcaattacgataatgcgaatgtattaaaattagatactaatcagttaaatgaaaacataaaagtcattgacgatatatttaaaaattatgagcagatagagccaactatagaagtcgaaaatggaaatacaaaattaaaattaaatggatattttattgcgtcaattataagcccattaaatttaaataaacttaataatttatatgttgaagaagaattttatcatacatataacgaattaattgttaaatatactgaggtaaaggaataattataatgaaaaaaatatttatgatggtacatgagttagatgtgaataaaggtggtatgacctcttcgatgttcaatagaagtaaagagttttatgatgcggacatacctgctgatattgttactttcgattacaaaggaaactatgatgaaattattaaagctttgaaaaaacaaggtaaaatggatcgaagaacgaaaatgtataatgtatttgagtattttaaacaaatttcaaataataaacattttaagtctaataaattgttatataaacatatttcagaaagactaaaaaatacgattgaaattgaagagagtaaaggtatttcaagatattttgatataacgactggtacatatattgcctacattagaaaaagtaaatctgaaaaagtgattgatttctttaaagataataaacgaattgaacggtttagttttatagataataaagtgcatatgaaggaaacatttaatgtagataataaagtttgttatcaagtattttatgatgaaaagggatacccatatatttcaaggaatattaatgctaataatggtgctgtaggtaaaacttatgtgttagttaataaaaaagaatttaaaaacaatttagcactgtgtgtttactatttagaaaaactaataaaagattctaaagatagtattatgatttgtgatggaccagggagttttccaaaaatgtttaatacaaatcataaaaatgctcagaaatatggcgttattcatgttaatcatcatgaaaatttcgatgatacgggtgcatttaaaaaaagtgagaaatatattattgagaatgcgaataaaattaacggtgtaattgtattaacagaggcacaaagattagatattcttaatcaatttgatgtagaaaatattttcactattagcaattttgttaagatacataatgctccaaaacattttcaaactgaaaaaatcgtaggtcatatttctagaatggtaccaacgaagcgaattgatttgcttattgaagtggctgagttagtcgtaaaaaaagataatgctgttaaatttcatatatatggagaaggatctgtcaaagataaaatagctaaaatgattgaagataaaaatttagaaagaaatgtttttcttaaaggatatacaacaactccacaaaaatgcttggaagattttaaattagtcgtttctacatctcaatatgaaggtcaagggttaagtatgatagaagcaatgatttctaaaaggcctgttgttgcctttgacatcaaatacggaccaagtgattttatagaagataataaaaatggttatttaatagaaaaccataatattaacgacatggctgataaaatacttcagcttgttaataatgatgtattagcagcggagtttggttcgaaagcgagagaaaacattatagaaaaatattcaacggaatcaatattagaaaaatggttaaatcttttcaatagctaaatgaaaaaatcctaggtattcatgagtacctaggatttttacgcatgataaatacaaaaaaagagaggatagtcctctcaaacaatagttaataaaattgtagccatttcttccagctgtaactactaatacaagctaagttcattacgatatgtatgatttcaaattcataaccacttacatatcctcttgtaagtttaagtgtgaagattgagcctaacataacacaaatataaaaaacattaacataaggcgttaaaaagccgataataagtgctaaacctccaacaacttcaccaattgacatcaatactgcgatggtaggtggtaaacctaaagagcctaagaagtgaattgttccatctaaatcaacaaatttcaaagtaccatgcactaagaatgatgttgctaacatccatctaattaaaagcatacctaatttcatcatgtcacctccaacattcatatttttaaaacatagtccaaattatatttgtaaacatgtggaaagtaaagattttttataagattaattattaaatattctattgtattgaacaattgttgtagaaagatgtttaagtcatcagttactttttgtatttataaataaagattagtacagcatagtgcaaagattatagggaaatgaattaactattgcatcgctatttatgaatcgtaaacactattatgaaattgcgagagtagtatggacaattagaatgatggtttgagataaatgagtgttattaaccagtgcgtcattttcaaaattagatgccatttgctgtttataataagaagatttgataattaactatgataagaaaaaataataatcccctaaatacattataaacaaattaaatgataaaataataatatatatttctactaaagttgtttggaggtaaatgtgtgaataggaatatcgttaaactagttgtgttcatgctaattttagttgtagcagtagcgggttgtggtcaaaaagatactgaagagaaaactgaaatgacgacaataaaagatgaattaggaactgaaaaaattaagaaaaatcctaaacgtgttgttgtattagaatatagttttgctgattatttagcagcattagatatgaaacctgttggtattgcagatgatggcagcactaaaaatataacaaagtcagtaagagataagattggggcatatgaatcggttggatctagaccgcaaccgaatatggaagtgataagtaaattaaaaccggatttgatcattgcagatgttagcagacataagaaaatcaaatcagaattgagcaaaattgctccgacaatcatgttagttagcggtacgggagattataatgcaaatattgaagcatttaaaacagtcgctaaagcagtaggcaaagagaaagaaggcgagaagcgtctggaaaagcatgataaaatattagcggagattagaaagaaaattgaacagagtacgttaaaatctgcatttgcattcggtatctcaagagcaggtatgtttattaataatgaagatacatttatgggacaattcttaattaaaatgggtattcaacctgaagtcacaaaagacaaaactacgcatgttggtgaacgcaagggtggtccttatatatatttaaataatgaagaacttgccaatatcaatccaaaagttatgattttagccactgacggaaaaacggacaaaaatagaacgaaattcattgatcctgcagtttggaaatcattaaaagctgtgaaagataacaaagtttatgacgttgaccgaaataagtggttgaaatcaagggggattatcgcaagtgaaagtatggcagaagatttagaaaaaattgcagaaaaagcaaaataaaaatacagcgctactcgtaaatcatataagagtggcgctgtatttttaattatgtttattatctgtcggatgtgatgatttacctgaaagtttatttcgaataaatttaattacataaccgacaaggattgttttaacagttcttttaatgaattggcgcatcgttacatacctcatttctctatatcttacgaactatatacccattcatatatgctttttaaacgtcattgtcacaatttaatttttagggaatataatataaccatctttatctgcttttttagtaaaaatgacaaaaattgcatgtattattgagatgatggtagggatacctgtccagaaaaataataagtgaaaaagaccttgtccaaatttatcagcataaaatttatgaatacctaaacctccaagaaataatgcaacaataacataaatggctttattgactttcatttgtaaatcctccttaactataattctacttaaattcgttgtgaaaaccaatatttctaactttagaattttcaaactttctaaaattataagtatatctttttaaaataagctagaatttctatataataaatgttaataacgtaaaagggaatgatgacatagtgatacgtcaagcacgtccagaggaccgatttgatattgcgaagttagtttatatggtttgggatgatatggaattagaattggtaaagcatctacctaaagacatggtattagatgcaattgaaaaaagctgtgttgatgcaacatatcgaactttttatcagcatattttagtttatgaagtagaaaataaagtagcaggttgtattattagctatagtggtgaaaatgaattgaaatacgaaaaagcatgggaactacttgacttgccagaaaaaataaaacaatatggcacgccattacctgtaaaagaagctaaagacgatgagtattatatagaaacaattgcgacatttgcagcatatagaggtagaggcatcgcgacaaagttattaacgtcattacttgaatcaaatacacatgttaaatggagtttgaattgcgatattaataatgaagcagcattaaagttatataaaaaagtaggctttatatctgatggacagattgaattatacaagcacatgtatcatcatttaattgttaaataaaaaaactcgacagttcgatgtaagtcgattgccgagtagtatcattttctattaaatgcctgcaaataatgcactaatataaatacctaatgcatataataaaccgaaaaatgtatttgttttaccagcagcagccattgctggcatcattgtaggcggtgtatcattcttcttgaaacgtctgataactttaacaggcattgggaatgataacaacgcaagtaagtaaaataatgagccaccaggtttaataatgatcgtaagtacaataaaggcataagcgataaagtacatgattgccataaatgttaaagaagcatttttacctaatagaatgggtaaagttttgcgaccacttgctttatctttgacacggtcgcgaatattgttagccatattaattaaaccgatagtgattactataggtacacttaaccaaattacataactttgaatattgccagtttgaataaagaatgcaataacgataataaacatacccataaatacgcctgagaataattcaccgaaaggcgtccatgaaatagggaaagggccacctgtatataggtaaccaacagccatacatactaatccaactggtaataaccaaaatgaagagttagcagctaaaaacaaacctaatattgctgctaagatgtaaaatgcaatggctaatcgtagcacaagctctgggctcataccgttgcgaacaatggcaccaccaatgcctacagattcatgatcatcaaggccttttttataatcatagtattcattaaacatattagttgctgcttgaataagtaagcatgctagtaacatggcaatgaataggctgattttaatatgatcttcgctaccaagaaaatatattttagatgctgctgtaccaactaaaacgggtactacggaagcagttaatgtatgaggacgcattaaatgccaatatttcttaactgtagaatattgctgatattgattactcattgaatacaaaacctctttaaatcatattttttataacaaagatattttaatagaaagtagcataaaggtcaattgacgtgaaaaattgcaagataagtttaagcaattcttgtaacacaattatccaaaaatgatacaatataataatgagtgaaaaaagacgaagaaagaagtgaaatggatggctacgggcgtattagaggacgatattgtcaaagagatatatggcagctcaaaggaatgggtttcagttgaagtgaaattatcacagtcactagacccgagcacattatttcatctcactgacaatgaggcaggagatcgcttttatatgcgtttgaatgataatcgaacgtcatattttggctacaaagcaattcaattattcaaaaataattctaaaaataaacaatctatttttaaagactgggaaaaattaaaacataacatcacatttatacatccgcaatctgagaaacatcatcttcgagttgttggagggttccaattttcaagtcataaatcagatgatgaatggcgagagtttggactaaatcattttgtattacctgaagttttaatttcaactgataataatgggacatttttaacttatacagttaaaagggaaagttttactgttgaggcattgaacgatttaatggatttgttcaacaatatatcggacatagatgtggacgagcaaattggggaaattactagaaatgaagatatttataaagatgactggcgtcaacttgtagtagaagctatagaatctattaataatgaagaaaaaattgtactagcacgtagacggttaataaagttcgataaagatatcagtattccatatattctaaagcaagcatattctaaagaaaaaaacagttatatattcttgttagaatcacaagattctatattcttttcacaaacacctgaacaattaataaaggtcaataataaaatactatcgactaaagctgtagcaggtacaattaaacgttcacaagatgaggacgaagatacaaaaaatgttgaagcatttttaaaagataataaaaacttaatcgaacatcgatttgttgttgacagtattttacatgatattaaaccttatatcactgaattacattatgataagacgcctaaaattctaaaaaatgatcatttatatcacttgtacactgaaataaaggcgccactgaaggatgattcgtatattagtttaattgataatttacatccaacacctgctttaggtggctatccaaaagaatttgcaatggattttattgagcagaaagaatttggtacgcgaggattatatggtgcaccggttggctatatagatatatacgatgattgtgaatttattgttgcaattcgttcgatgcttattaagaaagcacaagcaactttatttgctgggtgtggcattgttaaagattctgatccagatagtgaattggcagaaacgaaccttaagttcacacctatgatgaatgcattaggagtcgatatgaatgggaaatcataaagcagctttaacgaagcaagtttttacatttgcatctgagttatatgcgtacggcgtaagggaagtagttatcagtccgggatcacgctcaacgccacttgcacttgcatttgaagcacatccaaatattaaaacatggatacaccccgatgagcgaagtgcagcgttttttgcagttgggttaattaaaggcagtgaaagacctgtcgctatattatgtacgtcaggtacagcagcagcgaattatacgcctgcaattgctgaaagccaaattagtagaattcctttaatcgttttaacaagtgaccgtccgcatgaattaagaagtgtaggcgcaccacaagcgattaatcaagtaaatatgtttaataattatgtaagttatgagttcgatatgcctattgcggatgatagtaaagagaccattgatgcaatttactatcaaatgcaaattgctagtcaatatttatatggaccacataaagggccaattcattttaacttgccatttagagatccgttaacacctgatttgaatgcaacagaattgttaacttctgagatgaagattttaccgcactatcaaaaaagtatagatgcatcggcattaagacacattttaaataagaaaaaaggtttaattattgtaggggatatgcagcaccaagaagttgatcaaatactaacgtattcaacgatatatgatttgcctattttagctgatcctttaagtcatttaagaaaatttgatcatccgaatgttatctgtacatatgatttgctgtttagaagcggcttagacttaaatgtggatttcgtaattcgtgttgggaaaccagtgatttctaaaaagttaaatcaatggttaaagaaaactgatgcatttcaaatattagtgcaaaacaatgataagattgatgtctttccgatagcgccagatatttcatatgagatttctgcgaatgatttctttaggtcattaatggaagacacgacagttaatcgcgtaagttggttagaaaaatggcaatgcttagagaaaaaagggcgtaaagaaattaaatgttatttggaacaagctacagatgagagtgcattcgttggtgaattgattaagaaaacatctgaaaaagatgcattatttattagtaatagtatgcctatcagagatgtagataacttgttattgaataaaaatatagatgtctatgcgaatcgtggtgcgaatggtattgatggtatcgtttcaactgcactgggtatggctgtgcataaacgaataacattattgataggtgatttatcattttatcatgatatgaatggactattaatgtcaaaattaaataatattcagatgaatattgtattattgaacaacgatggtggcggtattttttcatatttaccacaaaaagaaagtgcaactgactattttgaacggttgtttggcacaccgacgggattggatttcgagtatacagctaagttatatcaattcgattttaaacgttttaacagtgtttcagaatttaaaaatgccacattgttatctgaaacttcgacgatttatgaattgataacgaatcgcgaagataactttaaacagcatcaaattttataccagaaattgagtgaaatgattcatgacacattataaattttatgaagcaaacgttgagaccaatcaagttttagtatttctgcatggatttcttagcgacagccgtacttatcataatcacatcgaaaaatttactgataactatcatgtcatcactatagacttaccaggccatggcgaagatcagtcttcaatggatgaaacgtggaattttgattatattacgacgttgttagaccgaattttagataaatataaagataaatcaataacattgtttggatattcaatgggtgggcgtgttgcattatattatgcaattaatggtcacatccctatatctaatttgatattagaaagtacgtcaccaggtattaaagaagaagcaaatcaattggaacgccgtcttgttgatgatgcacgtgctaaagtattagacatagcaggtattgaattatttgttaatgattgggaaaagttgccattatttcaatcgcaactagaattaccagttgaaatacaacatcaaataagacaacaacgattgtctcaatcgccacataaaatggccaaagcattaagagattatggtacaggtcaaatgccaaacttatggccgcgcctgaaagaaattaaagtaccaacattaatattagctggagaatatgatgaaaaatttgtacagattgcgaaaaaaatggcaaatttaattcctaatagtaaatgtaaattaatttctgctacaggtcatacaattcatgtggaagatagtgatgaatttgatacaatgatattaggatttttaaaggaggagcaaaatgactaacagacaatgggaaacacttagagaatatgatgaaatcaaatatgaattttacgaagggattgctaaggtaacaataaatcgccctgaagtacgcaatgcgtttacacctaaaacagttgctgaaatgattgacgcattttcacgtgcacgtgatgatcaaaacgtttcagttatcgtattaactggtgaaggtgatttagcattctgttctggtggtgaccagaagaaacgtggacatggtggttatgtaggtgaagaccaaatccctcgcttaaatgtattagatttacagcgtttaattcgtattattccaaaaccggttatcgcgatggtaaaaggttatgctgtaggtggcggtaatgtactaaatgttgtttgtgacttaacgattgctgctgataatgctatttttggacaaactggtcctaaagtaggttcatttgatgcgggttatggttcaggatatttagcacgtatcgttggacataagaaagcacgtgaaatttggtacttatgtcgtcaatacaatgcacaagaagctttagatatgggtctagtaaatacagtggtacctttagagaaagttgaagatgaaactgtgcaatggtgtaaagagattatgaaacactcaccaacagcgttacgattccttaaagcagctatgaatgctgacacagatggtttagctggtttacaacaaatggctggggatgcaacattgctttattacacaactgatgaagcgaaagaaggccgtgatgcgtttaaagaaaaacgtgatcctgacttcgatcaattccctaaattcccataagttattttgaatatgatattaagtcacttgcgtcgtttattagcgacgataggtggcttttttattttataagaatttaaaagggcattttaattaattatcataaagataagatagtttgagaaaaattaatagagaaagaataaatgttaaagattattattacaatgaaaaaacgagctggtgagaaattgaattctcgccaacccgctttatgaagtgaaatcatttaaattagttatactaagcgctcataaacgattggtcgcgaagtgccaataccttgtttggatgacgtttgcatgaggatatgctgtgtatcatcataatcaagaatataaatgatttcttcattatcaatagatgaaaatttaatgcgttgatgtgccgtatctataaaaagaatatgatattgattgtgacttgtatcatcgccatgacgtatacaaattgatttttgtaattgatgattactccaattaccaatgaataaattgatattggtttgttctagatgtgtgagtttggttgtgtcgtaaactaaatttataaattgtagttgatacatagttttacctgcctttaatcaatatctatattactttttagtaacctatcattgaaccataccagttataatcacgattgaatgataaatgtaataggcttgaatctgcatcttggattgataattctgtatcccaaggattccagtaaataagtttttcttggtcattaattttagcattaccaacaactgctagcgcatgtcctaaatgtgggtcattagggttttgagatacactttgtgcaaggatcataattcctacattatcttttgtaagttgatcaacttgttcatatgatggtacgccttcttgataatgaatatctctgccttgtgatttaccgtattcaatcatttgattagggaatgttgcacaattaggaaggtcttgctcacttacttcagggtataatgtacgcataatatcatgtgcattataagtgtctgtatttttagttgcatttaataatgctgccatactgaatcctgcacaccatgagttatcgaattgttgttctctaattttgaagttttttaatgtattttcatattgaacttgatcttcttgtatcgcttcgttttcttcaactttagtaggtgttactgtattttttaactcttgtttcaattttgctgaaactgttttagcacttgctttttcttttacattaccaggtagaggcgtagcttttactaatctaactttgccatcttcttcaaaataaaaccctttttcatcagtaagaacagtgatatttgaatttttatctttaatttggtctaaatctttagcgatgaagtttgaaattttaacactgtaattcatgtcttcttttgatttgtttaaatcatctttatttttaggactaagtgttaaagtataaacaattttaccgtcttttataactggataatagtaactattatcttcttcaccattaaatttataaattttaaaagcttcgccaagttcatatttaccagtttttgcattactttgtttatctaatgctttagcataaccagcaaattgttgttgtgctagatcttttactttttgaggtactttgtcactcttaacattaatttctagctgtttagagtgtgaatcggctttggctttattgttattagcaaatgcgcctagtgataaaataagcattgaaaccattatgatgcttataatattgaatactctagatttacatgaactattcatataataccctccatttaaatcaaaatattttacgttgctaagactttgcttctattttatctagacgaacttaattgttaattaagctgcatctggattgtctgaattattgttatcgccattgtctggattatcagggttgttagggttgtcagggttatttggttcatctgggttgttagggttatcaggattgttagggttatcaggattatctgggttattaggttggtcatcgttggcaaaatggatatcttcaatattttgttttaagaagttgcgtacattttcattaataaataccgcaccattaaattcatttggtacaccgccccaatgaattccgatcacttcatttttttcattaaatacaggtgaacctgaattaccaccagttgtacttaaatcatattgcatagcttcgcctttgaggtaagtgatttttcctttactttcccacattgttgctacaggtttatcaccaggatatcctgttacagtaatattttggttaacttgtgtttcagcattattactcattgttgctggtttaactacttcaccaatatgtttgttttgctcattaggggagaatttaactattgctaaatcaccttcgcctgaatatttagtgatttgttcagcagtgaaaccaccatttggataattgtcttggttaattgcagaagggaatgcttttaaagcatgaggatcaccgtgcgtagcatctacgacgtgtttatttgttaaaagagtatctttacctacaactacaccggaagcaataaatgtaccagtaggtgcttcaacttgaatataagttacgggtgcataatgaccattcgttgtatctgtgatttggtgacgatcgttatttggtaatataacatttgcgtgttcacgttgttctaatggtttaaggttaccgcctttttgaatcttaggtgtttgctgtttgcttgactgcgtttgttgtggatgattgtccatagcctttgaagataacgcgtttgctgctggagaactcacaagtgtcgctgttgtcaaagttgcaacgaataaagaactaacttttaaaaatttacctttcatctaaaaacctccaaaaaatttatttacaagttaaatataacactaaaaatttttaagtcaataagaatatataaataaaataaaaagtttttgtaaagattagagtttacaaaaacattaagggaattaaaattgaattgtattatactttattcaattgagttaaattgataagatcgtcaattgtttgcatttatctaaaagaataaataagaaaggaattgagagcgaatggaaagtatttgtttataataataaatagtaacttttgaataataattgtttggccaaaggtagattaatatgaatggtgatatattatttgagtgcttaagtttcgaagaacaattataagttagcatattaaaaccttttgatagaatcattttgagtgaggtgtttaaaggagaggaatataactcggtagtatttacagtctctatagagtattatttaaaacttatagaatataaaaaactgaacgtactatgaatttagttcacgacgtccagttcaacatatcatttttatttagtatttaaatatttagcaagtctcttcataccttcttttaaaacatccatttcataagcataggaaatccttacaaatcctttaccgaattctgtaaaggatgagcctggaacgattgctaaatgtgttgattcaagtaaatcgacacaaaattcgaaatcgtcatcggtgatatgtttaatacttgggaaaatataaaacgcgccttcaggttgagcggtaatctcaaaacctaatttagttaattcagatactaaataatttcttcgttctacataagcttcgttcatatatttaggagcttctaatccttcgttaagtgctgttatacatgctatttgagctggaacattggcacaaatacaattataggcgtgcataaatgttaatttatcaatcaaatattgaggtcctaatagaaaaccaattcttattccggttgctgagtgtgatttacttaaaccaccaattaatattaattgatcacgaatgtcttcaaattcagcgaaggatacatgtttaccactaaatgtattttcagcataaatctcatcgctaataataaataacggatatttttttaatacatttacgatatttaaaacttcatttctttttaaaactacgccagttggattagtcggataatttaacaagacagcttttgtctttggagaaatatgactttctaatgcatcaggtgtaattttaaattgtgttgctgttgtatcaatataaattggtttaccacctagtacttcgatgagtggtatgtagcctgcataaattggtcccggtattataatttcatctccaggctctatgatagaacgtaacgttgtgtctattgcttcacttgctccatttgtcacaataatttcttcaggatcataggaaaaatgataacgatttttgaagtattgactaattgcttcgcgagtttctaataaccctttattgtgagagtatgatgtcttgtcattgttaatagcatcaatatatgcctttttcacaacatcaggcatcgggaagtctggttggccaatagttaaattaacacaatcatccaaattattcatacgatttgaaaattggcgaatacttggtgctcttaaatatttagaattagaatttaaagaaagtttcatttgtgacacctcaaatataaatcaaatattgtctaaaaatttagaaattaataatatcataacatacttttaaagcaaaaaagggtaaattacttaagctttatttgaaaaacgaaaaatgtctaaatacactgtagtaactacttttcaaaatgaataaagtggttacagttaatgtacttagacagtataaaattatgaatctttaaactgtgatggtctttgtaaattaattattggatttgtccatttacaaacaaagtttgtagataatacatatacgatgattacagatatacttattaaataaagataagtcattaatgatataggattatcgaatgggtaccattcaaatcctctaacaatgccaataattaaaccatgtaataaatatacgtatagcgtacgactaccaatataagtatataattttttctttgttgacattaaatttagaaacgcagtcattgcgattaatataattccatataatataagtcgtttaaaaggactgaatatactctgtccttcattttcaagtgaagtatatggtgaacttcccaataaccaatctgcattgataggatgaatcacgtaaacgataaaaaacaaaataaaggtaatgatagatactggtattagtttttatttttaaaaatagccgtatgttttttggtgaaaatgtaacctagataaaatattgggaaaaatacgattgtccttgaaatgcttaagtagctatcgatgttatctgaaaaacctgctccaatagatataataattgaaactgatagcactttatatggattaaatcttctaactattactaaaatgacatgaaagaaaaatagcgtgatcaaaaaccataacgcaaatactgggttaaaaggatcaagttgtaattcgtcacttttacctgttaagaaataataaattgaaaagaatgcaaaaaatatcatataaggtactatcaaacgttttgaaattttttctaaatagtatggtttatcaatatttttcgcgaaataaccagatataaacaaaaatgttggcatatggaaactataaataactaggtataatgctgataaatatttatcgccactagtgtagggttgtaacatatgtccaaatacgactaataatattaaaattgctcttgcgttgtcaaaaaaataatctctctcttttaatgaagtcatattttatctcctttatgtccataagactcttactaatttattatattttgtattagttatgcaacaaatttgtctattgtgtcgaatagtattgtaaaaattataaaaaaagcatataatattataaataatatgtagtggagtagaacaacatgtataaacaacttgaaaaacttattacactgactaacaatgacttaaacttagtgaatagaagatttggacaacgcacggatatcaaatctgaacagctagaacttctccgtattttatttaattacgatcgcttatcacagtatgatttgacgatgaagattagcagggaacaatctatagtttcaaggtggattaagaaattagttttgaaagggtacatcacaagtcaacaatctagcgaagatttaagatgtaaagaattaattttgactgatcaagcacgtacattaatttcacaaataaataatgcacgttgcgaattgattgaagcaagatgtcaatgtttatcggaagtcgaattagacaatttaaatcaattacttgataagttaaatcaacgacgcatatcgttgtaacacgacaatagcaaacacataatttagtgtcgttgtgcacacaacaaaaattgaatcatgaattacaagcaaaagtagcggtgattgttaaaattgatggtaaacaatcaccgctatttttgcttgtgtatgtataaaaaagggatcaaaggtcatcccccatgattgatagtgggggatgacttttgatcctatgttcatgttgcttatttatattgtgggatgtcgaagtatttgccgacttcgccaattttatcatagtagcctttgatgattttagcattgatgttagcccaatctacatctgtagcatattggtgtgttcctggatgtgcaggattccatctcattttgtaaagtgtattttgaccagcttttacatatgagttgccgatgaatttagcaccaccaacgattgcttttgatactgtgtcccaaccagcttgtttagcatatttaataccttcacgtaaaggatcgttatcatatgcagcaataccaaatacgttatggtatttcgtgtttgagttagttacaactttgttgttcactacatctgcacctttcgctaattgagaagtaccgttacctgtttctaatagggcatgtgagataagataaacttcattaatgccatacatttgagcaacttggtttaatgtcatacctgtttgattatacttaattaattctttagctaaatcagttgatttaatccatgctaatttaccgttagataatttaccatagtaccaagtttgtccattaatgacttgttctttaacaactgcgaatggttgttcattaaatgcttttaatgagtatttagctgtatcagaatttggtgttacatagtaataaccattaccatttttaattacataagtgtagttataatctttggcagctgatgtagttggtttcacagcagttggtgcagttaaatcttttgcatttacccaaccagtgcggttattaatagtaccgtataaataaacatctttgcctacagatacttgtttcgttgcattaaatgtaccttgagcaatgttattgcctgttaaaatgacttggttattagtaccccaaggaaccattgataagccgttatttgatttattaacagtatatttttgagtcgttttaacttctttgcctaagttttgaacatttaagtcttttacattgaaccaacctaatgggatgttatggcttgtattgtttaataatacatacgtttcattaccatgagcacgctcttttgttacatagaacgtacggtctgcatatttcgcaccgtttttcgctgttttttcataaacagaagcacgaataccagtgttgtttggtttaacttgagcaatcttgctaactgtttgagtcgtttgtggtttagtaacagtataagcttttacagctgtttttggttgtgctactgcttttttaggtgcagcaggtacagctaaatatgctttacttacccaaccagatttaccatttacagttccaaataaatagatagatttatcaatttgttgttgcttagtcgctttaaaagtttggttacctgtaccagaaactgcaccagcttcttgtttataagtgccccaaggtactgaatataatttagtgcctggttttactgtatatgtttgcattacatttacaggtgattttgcattgttataaataacgtcaccttgtttaacccaaccaattaaagttggactattgtaatctttaactaagtagaatttgtttccacctaaacttgcttcttttgttacagcaaatgttttttgaacttctttcgttggcttaccagttttgtcataaactgtagtgaataagccattgtttttagcattaatttgagcaacaccgtttaatgatgaaactgttaatttattatttgttgtaggtgttgatggcttaggtgttggtgtaggcgtaggtttagcagtatcaactaaatatgctttacttacccaaccagatttaccattcacagagccatataaataaattgatttatcaatttgttgttgctttgaagccttaaatgtttggtttccagagccagacacactaccagcaacttgtttagatgtaccccaaggtactgtataaagtttcgtaccaggtttgattgaatatgattgatttacatttacaggtgatttagctgtgttgtaaaccacatcgccttctttaacccaaccaaatttattaccagaattgtaatcttgaacaagatagaatttttgattacctaatgtagctgttttagatacagcaaatgttttttgaacttcattagttgctttaccagttttgtcgtatacagtagtatataaaccactatttgttggtttgatttgtgcgacaccattgtttgcagcaactgttaatttaccagttgatggtttcgacggtgttgttggttttgatggtgtagtaggggtagttgtagattgcgtaccccatggcgccactttacccatttttattaaatatttttcattaattaagtcatataattgatcataactataattatgacttcttaaatatccatgtggatcggcatggtcagtaccacctaaatatttacttacagcgtagtgagtccatactgtaccatttccatcatactcagcactgtctggttttaaaccataatattgtaattgtgtagctgcatagtcagcatagttattcattgaacgtgcaaatgaagcatagtcgtgtgtgtgtacgatttcaacattgatgaatctagggttaccgactgcaccgacaccccaagataagtaatccgttggtgctgtttcgattatacgatccccatcaacaaatgcatgtacgaatgcgttttgatagttatttttcatataactaatttcaccatttatcgtcgaacgatcattagctgtatcatgaactacgataccttcaggacgacctacgccgttacggtatgcgtatttagggaagtaagatgtataatcttcttcaattttaggtgcttttaagttatttttacgaatgtaatcgttaattgaagagtttacttgtggtttatattttggcaaactcgtttttggtgttgcagcaactgatcttggttgtgctgaagcgctaaaagtagttactttaggtgtcgcttcagttttagctttaggtgctgatgtagttgcagctttaggtgctgcggttttatattgcgtttcaagagctgcaggtttagcagctgatttaattaattctggattaatttgattttctgaattatcatcttcatcatcaactaaactataaccagcatttgtaacattagtgttagttttaggtgctgtagtgcttgttgactttgcaacaggctgcgtattatttgtagtcgctgattgattagcacgagtgtcaccatttacttgtgcagtatcaactttttgacttacttgagcattgcctgttttgttatttgctgtttttggttggacaatagcagggtcttgatatacttgagtgccagaaatgttttgcgttggattttttacctcagcttttgcttgttcagtagttgctttaactttattactatctaaaatgtttttattagtagtttgatcttgtgtcgtctcagctgcttgaacttgatgtgcagtgactgctgaacctacaagcgttaatgcaaccattgatggtagtttgtaattgaattttttcgccattctatttattactcctaacatttattaattattactaacattatagtacctgttttatatacctgtgcgtatttaaccaatttgtaatatactcttaatttacattttcactgtaaaaaaatgaaaaaaattttgaatctcaatggtgacgtgacaaatcaaatagaattgatgtcaatttaagaattggtttattacaaatgtttctaaaatagatacaactttttttaattaagcgaggttaacttttttgtcatttcaatatgctcgatgccttcctcaagaaatatattacctctcattttaaagtttaaactttcataaaatgggatagcatgacattgggcattcatagtagctacgtaaaaaccttcatctttagctaatgattctacagcttgcataagcattctacccattccttgtccacgatgtgatttcatcacagctactcgttctattttgacagttgtttcattaatagggcgtattcgagcagtggcaactggctgtccattatcatatccaatgaggtgaatagattcagattcatattcatcaatttcactttcctcagggacgccttgttcttctacaaacactttctttcttatatagaagcaatcttctaacatcttttgattgtttacttttgaaaacataaaattcctccacatcctaacaaaatcatttacatttaatttactaataataacatagaataacgattgttattttcctcaaaaataattagacataaaaaagctataaagatgattgttgtgaatcatctttatagctaattaattattaatgttatagtgcttcttttctaataattgctgtatattgccaaaagattcgcatttgagcaatattccaattattcattcccattgtaaatcctgaaggcttaaatatattcacatcagttacttctaaagctgctgcaactaaatattgtaatggaatgctaagtgatttcattgtttcggtaatgccattttcatcatatacccatgaaaatggtaactctgattcgaaaacatcaacactattgaaaatttcaggtagggctaaaatataacatgcaccatctacaataggattgtcgatactatttttgtaataaattaggagtgcttcatagttttctcgatgctcatgattgacgtaaaaaaattcacttctaaaatgagccatatcttggctatgaatgatttgttgttctaacatattaaacatgccatttatatttgcaatcttttcgtatgtttttctactcatgtatgatgctcctttcataaatagtaaatgttaatcgtcatataatattaatttacaacaccattttggttatttgaagcttgtggcgcttgttgtgtgccaccttgattttgatttgagttttgatctgtagcaggttgttgttgattgctggaatcactgttattagttgaatcactgttctcgttagatgtcttatctttatctgtcgtatcattttgttcttttctcaataaactattatctaaaggcgttaatggtattaatgaaccataatgattaatgacacgttgatctaagaaatcatttttatcattaataggtgataattctaagtctttacgaagtaagtttgcatatttttgaatgctttcaacacttggatgataatagtaaataccatttaacatatcatctttaccttttaattgcgcagttttaatttcaacatcatttgttaagtacatttttgctaaagctttaatttcagagttagttaaattatgctttgcatttttacctacaatttgaatcacgttatcaagtttatcaatagaatcaacttcctgtgctttttggaataaaatcttaattaattccatttgacgttgtccacgttttaagtctgaatcatgatgtctagttctagcaactgctaaagcctcatcaccatttaatttttggtacccttttttaattttaatcttaccagtatcatctgtgttaggttcatttaagtcgtatggcacatcatagtatatgccaccaagctcatttacagcctcgacaaatgctttcatattgactctcacataataatcaacaggtacattcatggtagcttctaccgaatccattgcggcaattggaccaccatatgcatgtgcatgggtaatcttatcgtaatagccaactttaggaatgtagctgatagtatcacgtggaatactaagcattctaatttgatgttttgattgattaaaagtagttaaaatcatagcgtctgatctagagtgttcagcatcctgtcctttttttcttcttccatcgttatcatcgatacctaagaaaagaatagagataggttgttcttcgggattgactttattatctcttaagttggattgacgattagcatttttgctgtcttgagaagattcgaatgcatcttgggacgttttaaaaagtaacgtagcgaagactattggaacaacaatgagaaccaatgctagaaggatcaaaaagtattttaaaaatttattcatgattgatgctcctatattaaatttttgttaaatcataatcataattttaaaatataattagttgaacgatatttatacaacttcattactaatacattatagccttaaattgtagtactttatagtaaaaaatacaaatgttatgtcaaagttccttgtaatttgaatgttttgttaaaatcaaaaagcatttttaaaaatataatgcgactttagtatgatgtcttaaaaaatttaaaggcgtaatataaattcgagtgatttatacaaagtgataaggtataattaattttgttgtatagataacatattagaaaaacttattactatgtagcgtaaagcataaatgaatgataagttaatttttgtaagttgtattattaggcatctaggttcaaatttttaacgatttaaatatataaaatgaatacattgtgaggcaattatcaaatgaaatttaataaagtaaaactagttatacatgcgtgtgtactattatttatcattatttctatagcgttaatttttcatcgattacagacgaagacacattctatagacccaatacataaggaaacaaaattatcagacaatgaaaaatatttagtggatcgtaataaggaaaaggttgcgccgtctaaactaaaagaggtatataatagcaaggatcctaaatataagaaaattgacaagtatttacaaagttcattatttaacggttcagtagctatatatgaaaatggcaaattgaaaatgagtaaaggttatggatatcaagattttgaaaaaggtattaaaaacacaccgaatacgatgtttttaataggttcagctcaaaaattttcaacagggttactgttaaaacagttagaagaagaacataaaataaatatcaatgatccagtaagtaaataccttccatggtttaaaacatctaagcctatcccattgaaagatttaatgttgcatcaaagtggattatataaatataaatcctcaaaagattataaaaatttagatcaagcagttaaagcgattcaaaaacgtggtattgatcctaagaaatacaaaaagcatatgtataacgatgggaattatttagtacttgcgaaagtaattgaagaagttacaggtaaatcttatgctgagaattattatacaaaaataggagatcctttaaaacttcagcacacagcattttatgatgaacaaccttttaaaaaatatctagcaaaaggttatgcttataatagtacaggactttcattcttaagacctaatattttggaccaatactatggtgcaggtaatttatatatgacaccaacagatatgggtaaattaattactcaaatacaacaatataaattattcagtcctaaaataaccaatccattattacatgagtttggtacgaaaaagtatccagatgaatatcgatatggtttctatgctaagccaacattgaatagacttaacgggggattctttggacaagtctttactgtttactataatgataagtatgtagttgtacttgcattaaatgtaaaaggaaacaatgaagttcgaatcaaacatatttataatgatattttaaaacaaaataaaccttacaatacgaagggtgttattgttcaataattaatatagaagatataacatgtatatggcattaaggcatcgaccttatctgaccagtatacgagttatatcttcttttttatagtggtaaaaagtttaaagtataaggttgaagaaggatgagtttaaaaatatgtgttaactgataaaaggggaaatcatttggtgagttggcatcagactaaaatgaatgaagacgaatacgttggtccatgcgtggtgtgaatgttttctaaatctaactggaaatgataatttaataatgtacacttttgattgtttaaacatgtacaatttttaaaaacctagggataattttattgacgtgaacaacattgagattatctttagacataaatatggattttgaagttactatatttattagttgtggttgttaatgtattaattgaattgattataatgattgtcttataagatatagaaggggacttaaccatttaaaaattgaaggaaaataaaaaccagctaacaaaagtgttagctggttaaactttacattattaaaatgttgtttataagtgtgaagagtgaccgccttgcataacccaatatgttccgacaacgaaacaaagtgtaattacaagagcaaagataactttgaatgtttgtaaacgtccatctttaccttcagttaaatgcatgaacattaataattgaagtcctgcttggacgaatgcaaagccaaagataattgtcaacttcgcgtggaatgttaatgacgtgtatagtgttacgtaaactgctaaaagcgttaatacgatagatgcgataaatcctacagtatgtttcattattgtactcatccgctatacaccatccctatcatatatacggcagtaaagatgaaaacccaaacaacatctaagaagtgccagtataaacttactataaataattttggcgcattatatttgtctaatccgcgtcgttggatttggattaataaacaaatggcccaaacgatacctagcgatacgtgacaaccatgcgttcctaataggataaagaaactagaccagtaagaaccaattgttgggttaacgccttctgatgcatagtgtgcgaattcataaatttcgaatccaacaaagactaaacctaaaagtaacgtaatgatcatccaaaacatcattaacttttgtttttcttggcgcatgtagtaaatagcaataccacatgtgtaagaactgaataataatgcaaacgtcattattaaaacaagaggcaattcaaataactcagtagtcattttacctgcataatcgccaccatgttgcaaagttaatagtgtcgcaaatagggtaccgaataacgcaaattcggctgtaatgaaaatccaaaagccaagcttatttaattcgccttcatgtgtgcgtgaatcaatagtgtttgtatcatgactcatgacttacagcctccctttctttaatacgcgcttctcttaatctagcttcagtttctgcaacttcagcagcagggatatgatatccgtgatcgatttggaaactgcgataaatcatagtaccaaaaataccgaataaacaaattaatgctggaattacagtttcgaaaattaagaagaaaccgccgatagtcataaagataccaatccagaatccaacaggagtattgtttggcatatgaatgtctttgtaattatggttgtctaagtaatgacgaccatgttctttcatatcaacaaatgtgtcgtagtcattccaatctggtgtaatggcaaagttgtatttaggtggaattgctgatgcagtagtccactctagagtacgaccaaggccatcccagttatctccagttgcttcacgtggagatttgaagtgactgtatacgatactaacaacaaggaataagaatccgattgccattaataatgcaccgatagttgaaattaagtttaataagaaccaaccatctgatggcatataagtgtataaacgacgtggcataccatctaatccaagaatgaattgtggtaagaaacaaacgttaaatccgatcatgaagaaccagaagcaccatttgtttaatgtttcgtttaatttgtaacccatcatctttggataccagaagattaaaccagctaagcaggcaaatacaacaccagtaaccaatgtatagtggaagtgagctactaagaagtacgtattgtgatattgatagtcagctgatgccattgctaacattacacccgtaacaccacctaaaaggaagttagggataaatgctaatgagaatagcattggtgactcaaatgtaatacgtcctttatataatgttaataaccagttaaacaatttcacaccagttggaataccaatcagcattgttgaaattgagaagaatgagttgattaacgcaccattacccattgtgaagaaatggtgaacccaaactaagaaactaaggaacgcgataccggcagttgcccataccatactttgatgtccgaataaacgcttacgagcgaatgtcgggataatttctgagtaaataccaaatgctggaaggataacgatataaacttcagggtgcccccatacccagaagaagttagcccaaagcattggcataccgccatgtgcaactgtgaagaatgctgtgtcaaatattctatcagttgtcattaatgctaacgctactgttaaaggagggaaagcaagaataacaattaatgtagtaataaatgttgttactgtaaacattggcatttgcataaacttcatagttggtgttttacatcttaaaattgttacaaagaagttgatacctgtagctaaggtaccaagccctgaaatttgtatagctattaagtaatagttaacacccggaccaggactgaattcacctgctagtggcgcatagtttgtccaaccagctgctggtgaaccaccaataataaatgacaggttgaataaaatcatacctgcaaagaatagccagaaacttacgttgtttaatactgggaatgcaacatcacgtgctccaatttgtaatggaacaacgatattccataaaccaaagataaatggcattgccatgaagataatcatgattacaccatgtgtactaaaaatttcgttatagtggttagattctaaaaatttgttatcaggtactgttaattgcgcacgaataagtaacgcatcaataccaccacggacgaacattaatacggcacagattaaatacataataccgattttcttatggtctacagatgtgaaccattctttgtaaagatatttccataatttaaagtaagtaattactgcgattaaaccaataactaagaatggggcaccaatttgtgccattgtaatcatccagttacctttaactagtaattgatcccatggaaaattcattaatgtccacctccatgatcatcattgtcttgatcttgcgcatcttttgaaattttcttcatttctttcgcatttttcgattcatctttcttgaactcattgttatatggttcgtcatttccaagaatcatcaacttcataccatgtcgtttatagttcgcatttgtaatttgagctttacgagcaggtattaatggtttgtctgatacatctttaaacatattttcttcactagtgaagtttggatctttcaattcgaaattgaaacgtttatatgcatagaagatgtattctggatcggctgctggatcaacaaacgccatatgtgtaccattaaattctaaagctttattaggtgtgcttggtaataattgtttatcaaatgtatcttgatctaacgttttcttacctttaacttctttcacccatttgtcgtagtctttttgactaacggcatttactttaaatgtttgacgtgagaatccttcaccattgaagttagagttacgacctctgaacgtaccagtttgagatgcttctaacgtccaattcattgtcatgccagtcatggcatatttttgaccacctaattgtggaatccagaaacttgtcattgtatccatagcttgaagcttaaatacaacaggacgatctttagggattgttaatgtattaacagtctctatatgttcatctggataagcaaagaaccatttgtatcctgcacttactgcatatacaaccattggatctttctcactcttcggtggtttttcgtaatcgtataaagttttaactgtaggaatagctaaagcagcaacgattatgataggtattacaaaccatattgtttcaatgatggcattatggtgcatcttaccagattcggcattcttattataactatacttgtaaataaaaatggcgaacatgccaagtacaacgaaacaaataacaagcatgaagacgattgaataaagaatcaagaacttctgactacttgctactggcccttttgcgttgaaaatttctatatttgaacaaccactaagtaaaattagtgtgccaaataatagaagcaaagacttaaattttgacacttttttgacctcctaatactacaaatgtagggcttaacattaattttaagttattacacaatatttacaagggcttatgggaaaaaaattaataaaattgtatcaaaaatgttgataaatcaaggtgtgacgtgggttcacacatttgttaaaattatgtgtacattttgtgactaatagcgtttttgaaaaaattgcttcatatttaaaaggaaagttgagaatagctttcaattaaaggttaattgaatgaaaataaaaaaagtttgaaattgtctaataaattgaaaatgatggctagttgattgaaaggaagcgcaaacattttaataaggaatttgccaaaagtaatttatcgttaaacaatgaaaagtggaaatttgtttgttcaaaatcaaaacatttttttaaaaagagcagttaagttttaataatttgataggtagtcctttggtatacagaaaaaatacaatatttgggttaaagttgcagatgaagttagaataacaaataaaatggtagcaaaacatgttcgtttgctaccattttatttgcagtatagtgatgagggctatttaacctcaatatacctagtggaaattttaattgcaccatctgaatcagtgacatgatatttaatttgatatttaccagatttagatgtatcaatttggccatcgactttaattttatcggttaaatctccatcttctttatcaaatgcacttatgccgtttagaaggttataatcttgacctttcttaataacgatatcattagcgcctttaatttgtggtgtagtattcgtcgttgcatctgcatttaaatttggtgttactagtgtagcagaaacaccgagggctgataatgactgtaatagtttattcataatgtaacctccgaatgataagtcatttctgagttagctttactataccttaatttatattatttacacatcatactatagtcctaatcttaccctataaagaatgaaatttaaatataaatttataaataatgaggaaataattattattttgaaaatctgccacaattgtaaaattaataatttagggataatttgaaatcaaatataactttattcgacagtttgaacttaaatttttgtgtatcaaaacaataagaaaagggaggcgaaaatgataaagaaccactaatgattaactatgtagtagtactttatcatagtcacagcttctgtgttggggcccatccccaacttgcacattattgtaagctgacttttcgtcagcttctttgttggggccctgactagaattgaaaacttgttacaagcttattttcattcaattaactactgtctatataaaattgttgagccaagtacaaagtgaaatgctcccttcaaagccttcatttattcaatgtctactttgaagggagcatttgatcgattaatgtcccagatttttcttgttattcattgcaattgcaaaataatatttaatgtgggttaaaagacttcattaaaactcagttattagggagtgggacagaaatgatattttcgtaaaatttatttcgtcgtcccaccccggcaaggttgactagaattgaaaaaagcttgttacaagcgaattttcgttcagtcaactactgccattataactttgtagagcatagaacattgatttatgtctcaggctctttacgaatcaatacctcgacgcattttttctgcaagcaaagtattatttaataccatagtaattgttaatggaccaacgccaccaggaactggtgtaatagctccagcaatttctttaaccgcatcataatcaacgtcaccttttaatttgccattttcatctggcgtattgccaacatcgataattactgctccttctttgaccacatcttttgttactaaaccaggcttaccaactgcactgacaatgacatcagcatcttttaaatatgatgccatatcttttgaacgagaatgtaagattgttactgatgcatttttttgaagtagtaacttagaaactggttgtccgacaatatgacttcgtccaattacaactgcatttttaccttctaaatcaatatcagcatgttttaatatttccatgatgccgagcggtgtgcaaggtacaaaagtttgttcatcgatatataatttccctatatttattggatgaaaaccgtccacatctttttcaggattgattgcttctaatattttctgttcgctaacttgttttggtaatggtacttgtaccaaaataccacttacagaatcatcattatttagtctatttagttcgtttaatacttcttcttcagtagctgtttcttccaaatgtacgatttctgaaatcataccaattttttcagctgctttcttttttgatctaacataactttgactagcgccatcattaccaactaatataacggataatttaggtgtaaaacccttttcttttagcgcttcaacttgatcttgtaacccctgtctgtagtctttggcaatttgtttaccatctaaaattttagcaaccataaaaacttctcctcctattgtcaatatcctaactttgttagtttataaaactaatttacatagcaaaagacgtaaattcaaacaaaaaatcaaaataaagttcgatttttgattgaaaaagcagaaattgcttgttatgctatatctataatatacaactaaagtaattcacaattcaaacttttgaaagggtgtacaaagtgaaagtagcagtcattatgggcagttcttccgattggaaaattatgcaagagagttgtaacatgttggattattttgaaattccgtacgaaaaacaagtagtatccgcacatcgtacgccaaaaatgatggttcaatttgcttctgaagcgagagaaagaggtataaacattatcattgcaggcgctggcggtgcggcacatttaccaggtatggttgcatcattaacgacgctaccagttattggagtgccgattgaaacaaaaagtttaaagggtatagattctttattatcaattgttcaaatgccaggaggtattccggttgcaacgactgcaattggtgcagcaggtgctaaaaacgcaggtatacttgcagcaagaatgttaagtattcaaaatccttctttagttgaaaaactaaatcagtatgaatcttcgttaattcaaaaagtggaggacatgcaaaatgaacttcaataaattaaagtttggtgcgactattggcattattggtggtggtcagcttggaaagatgatggcacaatcagctcaaaaaatgggttataaagtggttgtattggatccttctgaagattgtccatgtagatacgttgcacacgaatttatacaagccaagtatgacgatgaaaaggcactcaatcaattaggacaaaaatgtgatgtgattacttatgaatttgaaaacatttcagcccaacaattaaaactattatgtgaaaagtacaatattccgcaaggttaccaagctatacagttattacaagatcgcttaactgaaaaagaaacattaaaaagtgctggtaccaaagttgtcccgttcatttcagtaaaagaatctacagatattgacaaagcaattgaaacattaggatatccttttattgtaaaaactagatttggtggctacgatggcaaaggtcaagttttaattaacaacgaaaaagacttacaagaaggttttaaattaattgaaactagtgaatgcgtagctgaaaaatatttgaatatcaagaaagaagtatctcttactgttacaagaggaaacaacaatcaaatcacttttttcccattacaagaaaatgagcatagaaatcaaatacttttcaaaacaattgttccagcgagaatagataaaacagctgaggcgaaagagcaagttaataaaattatccaatcgattcatttcattggaacatttacagttgaattttttatagatagtaacaaccaattgtatgtgaacgagatagcaccaaggcctcacaattccggacattattcaattgaagcatgtgattattcacaatttgatactcatattttagcagttaccggacaatcattaccaaattcaattgaattattaaagccagcagtcatgatgaacttactaggtaaagatttagatttattggaaaatgaatttaatgaacatccagagtggcacttacatatttatggtaagtctgagcgtaaagatagcagaaaaatggggcatatgactgtactaacgaatgatgtaaaccaaactgaacaagatatgtacgctaaatttgaggggagtaattaaagcatgacattattatatgaaggaaaagcgaagcgcattttctcaacaaatcaagaaaatgaattaagagttgaatataaagatgaagttactgctggaaacggggctaagaaagacacaatggcaggtaaggggcgattaaataatcaaattacttctattatatttaaatatttacaagaaaatggaatagaaagtcactttattaaacaattatctgaaacagaacaattagttaagcctgtgaaaataattccattagaagtagttgttcgtaatattgctagtggatctattacaaagcgtttaggttttgaaaatggtgaagtttttagagaaccacttgtagaatttttctataaaaatgatgcgttaaatgatccgttgataacggatgaccatgttaaattgctcaatatagcatcagatgaagatattgaaatactaaaatccaaagcattaaagattaataatgtgttgaaacaattaatggatgctatgaatttaaaattagtagattttaaaatcgaatttggaaagactgagactggtcaaattttgttagcggatgaaatatctccagatacatgtcgaatttgggataaagctaccaatgcaaactttgataaagatgtatatagaaataacactggatcactgattgaaacatatcaaatatttttaaacaaattggaggatttaaaataatgaaaacaattgaactacatatcacattacaaccacaagtattagatacgcaaggacaaacgcttactcgagctgtacatgacttaggttatgcacaagtgaatgatattcgtgtaggaaaagtattatatatgacagtggatgaggttagtgatgaaaaggtacacaacattattacaactctaagtgaaaaattgtttgcaaatacagtgattgaagaatatagctataaagtgttagatgatgaaaaggagaatgcataaaatgaaatttgcggttcttgtttttccaggttcgaattgtgatagagacatgtttaatgctgctattaaaagtggtgttgaagcggaatatgtagattatagagaaacatcactaagtggatttgatggcgtacttattcctggtggattttcattcggggattacttaagatctggggcaatggctagtgtagcgccgattatttcggaagttaaacgtcttgcagctgaaggtaagccagtattaggtgtttgtaatgggtttcaaattttaactgaaataggcttattacctggtgcattattgcataacgattcacatttatttattagtagaaatgaagagttagaaatagtgaataatcaaacggcatttacaaatctttatgaacaaggtgaaaaagttatatatcctgtagctcacggtgaaggtcattattattgtactgatgaaatatatcaacaattaaaagctaacaatcaaattattctgaaatatgtgaataatccgaacggttcatatgatgatattgcaggaattgttaacgaaaaaggcaatgtatgtggcatgatgccacatcctgaaagagctttagaaacgttgttaggtactgatagtggtgtgaaattatttgaagcgatggtaaaaagttggagggaacaacatgtctaaatttatcgaaccaagcgttgaagaaattaaacttgaaaaagtatatcaagatatgggattaagtgatcaagaatatgaaaaagtttgcgatattttaggcagacaacctaactttacagaaacaggtatcttttctgttatgtggagtgaacattgctcttataaacattctaaaccgtttttaaagcaatttcctacgtcaggtgaccatgtgcttatggggcctggtgaaggtgcaggggtagtcgatataggtgataatcaagccgtagtatttaaagtagagtctcacaatcatccatcagcaattgaaccatatcaaggggctgctacaggcgttggtggaatcattcgtgacattgtctctattggggctagacctattaatttgttaaacagtcttagatttggagaattagataataaacaaaaccaaagattacttaaaggtgttgtaaagggtatcggaggttatggtaactgcattggtattccaacaactgctggtgaaatcgaatttgatgaacgttatgatggcaatccacttgttaatgcaatgtgtgttggtgttatcaatcacgacatgattcaaaaaggcacagcaaaaggtgtaggtaattcggtcatttatgttggtttgaaaactggtcgagatggtattcatggtgctacttttgcatctgaagaattgacggaagaaagcgaaagtaaacgaccttctgtacaaatcggtgatccatttgtaggtaaaaaattaatggaagcaacacttgaagcaattacatttgatgaattagttggtattcaagatatgggtgctgctggtttaacatcttcatcgtctgaaatggcggcaaaaggtggtagtgggttacatttgagattagaacaagtgccaacacgtgagccaggtatttctccttatgaaatgatgctttcagaaactcaagaacgtatgttactagttgttgaaaaaggtactgaacaaaaattcttagatttatttgataagcacgaattggatagtgctgttataggtgaagttacagatacaaatcgttttgttttaacatatgatgacgaagtttatgctgacattccagttgaaccactagctgatgaagcacctgtatatattttagaaggagaagaaaaagattataatacttctaaaaatgattatacacacatcgatgttaaagatactttctttaaattacttaagcatccgactatagcatctaaacactatttatatgatcaatacgaccaacaagttggtgccaatacgataattaagccaggacttcaagcatcggtagtacgtgtggaaggcacaaataaggcaattgcttcaacaattgatggtgaagcgcgttatgtatataacaatccatatgaaggtggaaagatggtagtagctgaagcttatcgaaatttaattgccgtgggtgcaacaccattagcaatgacagattgtttaaattatggttctcctgaaaagaaagaaatctatcaacagttgatagattcaacgaaaggtatggcagaagcatgcgacattcttaagacaccagtagtttctggtaatgtatctttatataacgaaacgaaaggtacttctattttcccaacaccagttgttggaatggtaggtttgattgaaaatgtaaattatttaaatgattttgaacctcaagttggagataaattatatttaatcggtgatactaaggacgactttggtggtagtcaacttgaaaagttaatttatggcaaagttaatcatgaatttgagtcattagatttgagttcagaagttgaaaaaggtgaatcaatcaagaccgctattcgtgaaggactattatcacatgttcaaacagttggtaaaggtggcttactgattaccttagctaaactaagtgcgcattacggtttaggattaaaatcttcaatagatataacaaatgcacaattgtttagtgagacgcaaggccgatatgttgtttctgttaaatcaggtaaaactttaaatattgataatgcaatagaaattggacttttaacagatagtgataatttcaaggtaacaacaccatatacagagattagtgaaaatgtttcagatattaaacaaatatgggaaggggcaattgctcaatgtttaactactcaggattaaacgaagaatgtggcgtgtttggtatttggaatcatcctgaagcagcgcaactaacatatatgggacttcatagtttgcaacatcgtggtcaagaaggtgcaggtatagttgtttctgatcaaaatgaattaaaaggcgagcgaggattaggcttactaactgaagcgattaaagatgatcaaatggaacgattaaaaggatatcaacatgcaattggtcacgtccgttatgctacttcaggtaataaaggtattgaaaatattcaaccgtttctgtatcacttttatgatatgagtgtaggtatttgtcataatggtaacctcattaatgctaaatcattgcgtcagaatttagaaaaacaaggtgctatcttccattcgtcttctgatactgaagtcattatgcatttgatacgtcgaagtaaagctcctacttttgaggaagcgttgaaagaaagtttgcgaaaagttaaaggcggttttacatttgcgattttaactaaagatgcgttatatggcgcagtagatccaaatgctatcagaccacttgttgtaggtaaaatgaaagatgggacatacatccttgcaagtgaaacatgtgcaatagatgtgttaggtgcagaatttgttcaagatattcatgcaggtgaatatgtcgtgattaacgataaaggtattacagttaaatcttatacacatcatacgacaactgcaatttctgcgatggaatatatttattttgctagaccagactcaacaatagctggtaaaaatgtccatgcagtacgtaaagcttctggtaaaaaattagcccaagaaagccctgtaaatgctgatatggtcatcggtgtacccaattcatcgctatcagctgcgagtggttatgctgaagaaataggtttgccatatgaaatgggactagttaaaaatcaatatgttgcaagaacatttattcaaccaactcaagaattacgtgagcaaggtgtgagagtgaagttatctgcggtaaaagatatagtagatgggaaaaatatcattcttgttgatgattccattgttcgcggtacgacaattcgacgcattgtgaaaatgttaaaagattctggtgcaaataaagtgcatgtgcgtatagcatcaccggaatttatgtttccaagtttttacggaatcgatgtttcaactacggcagaattaatttctgcaagcaaatcacctgaagaaattaaagattatattggcgctgattcattagcatatctatctgtagatgggttaattgaatcaattggtttagattatgacgcgccatatagtggcttatgtgtagaaagtttcactggagattatcctgcagggttatatgattatgaagcaaattataaagcgcatttaagtcatcgacaaaagcaatatatttctaaaaacaaacacttttttgatagcgagggaaatttaaatgtctaaagcatatgaacaatctggtgtaaatattcatgctggttatgaagctgtagaaagaatgtctagtcatgttaaacgtacgatgcgtaaagaagttatcggtggtttaggtggattcggtgctacatttgatttatcacaattaaatatgacagcgccagttttagtttctggaacagacggagtaggtacgaaattaaaactagctatcgactatggtaaacatgattcgataggtatcgatgcagtcgcaatgtgtgttaatgatattttaacgacaggtgcagaaccattatattttttagattacattgctacaaacaaagttgttcctgaagttattgaacaaattgttaaaggtattagtgatgcatgtgttgaaacgaatactgcacttatcggtggagagactgctgaaatgggtgaaatgtatcacgaaggcgaatatgatgtagctggatttgctgttggagcagttgaaaaggatgactatgtagatggttcagaagtgaaagagggacaagttgttatagggcttgcgtcaagtggcattcattcaaatggatacagtttagtgcgcaaattaattaatgaatcaggcattgatttggcatcaaacttcgataatcgtccatttatcgatgtctttttagaaccaactaaattatatgtcaaacctgtacttgctttgaaaaaagaagtttctattaaggcaatgaatcatattactggtggaggtttttatgaaaatattccacgtgcattgccagccggatatgctgctagaattgatactacatcatttccaacaccaaaaatatttgattggttacaacaacaaggcaatatagacacaaatgaaatgtataacatttttaatatgggtattggctatacggttatcgttgatgaaaaagatgtatcacgcgctttgaagattttagcagaacaaaatgtggaagcctatcaaattggtcatattgtgaaaaatgagtcaactgcaattgaattgttgggggtataacaatggttaaaattgcgatttttgcatcaggttcaggaagtaactttgaaaatatagttgagcatgttgaatcaggaaaacttgaaaatattgaagttacggcgctatatacggatcatcaaaatgcgttttgtatagatagagcaaaaaagcacgatattcctgtttatattaatgaaccaaaacaatttgattcaaaagcagcgtatgaacaacatttagtaacattattaaatgaagataaggtagagtggattattctagctggctacatgcgtctaattggtccagacttattagcttcatttgaaggtaaaatattgaatatacatccatctctattgccgaaatataaggggattgacgcaataggccaagcatatcatagtggcgatactattactggttcgacagtacattatgttgatagtggtatggatacgggagaaattattgaacagagaaaatgtgatattagaccggacgattcaaaagaacaattagaagagaaagtaaaaaaattggaatatgagttatatccaagtgttattgctaaaattgtaaaataaggagtatgtatgtgatgaagaaagctattttgagcgtatcaaataaaacaggtattgtagagtttgctaaagcgttaacgcaattaaattatgaattatattcaacaggtggtactaaacgtatattagatgaagcaaatgtaccagttcgttctgtttcagacttaacacattttccagaaataatggatggccgtgttaaaacattacatccggctgttcatggtggcattttagctgatcgaaataaaccgcagcatttaaatgaattatcagaacaacatatagatttaattgatatggtagtagttaatttatatccattccaacaaactgttgcaaaccctgatgtgacgatggacgaagcaattgaaaatattgatattggtggtccaacaatgttacgtgctgcagctaaaaactataaacatgtaacaacaattgtacatccggcagattatcaagaagtattgacgcgattaagaaacgattcgttagatgagtcatatagacaatcattaatgattaaagtttttgagcatactgcagaatatgatgaagcgattgtacgtttctttaaaggggataaagaaactttaagatatggagaaaatccacaacaatcagcgtattttgtgagaacttcgaatgctaagcacacgattgcaggcgctaaacaattacatgggaaacaattaagctataacaatattaaagatgcagatgctacactagctttagttaaaaagtttgatacacctgctacagttgcggttaaacacatgaatccatgtggtgttggtatcggtgacacgatagaacaagcatttcaacatgcgtatgaagcggatagtcaatcaatatttggtggaattgttgcattaaaccgagctgtaacacctgagttagcagagcaattgcatagtatctttttggaagtcattattgcaccaaaatttacagatgaagcattagatattttaaaacaaaagaagaatgtaagattattagaaattgatatgactatagacagtaacgaagaagagtttgtttcagtatctggcggatatttagttcaagataaagacaattatgtcgtgccaaaagaagaaatgaaagttgttacagaagtagcacctacagatgaacaatgggaagcaatgttattaggatggaaagttgtaccatcagtaaaaagtaatgcaattattttaagtaataataaacaaactgtaggtataggtgctggacaaatgaatcgtgtcggtgctgctaaaattgcgttagagagagctattgaaatcaatgatcatgtagcgttagtatctgatggatttttccctatgggagatacagttgaacttgcagcacaacatggtataaaggcaattatccaaccgggtggttcgattaaagatcaagattcaattgatatggctaataaacatggtattgcaatggtagtcacaggcactcgacattttaaacactaattttaaaggggcgtaacataaatgaatgtattagtaattggtgctggtggacgagaacatgcacttgcatataaacttaatcaatcgaatctagttaaacaagtgtttgtcattccaggtaatgaggcaatgacacctatagctgaagtacacactgaaatttcagaatctgatcatcaagcgatactagattttgctaaacggcaaaatgttgattgggtagttataggtccagaacagccgctaattgatggattagcagacattttacgagcgaatggtttcaaagtgtttggtccaaataagcaagcagctcaaatcgaaggctcaaaattatttgctaaaaagataatggaaaaatataatattccaactgctgattataaagaagttgagcgaaaaaaggatgctttaacatatattgaaaactgtgaattgcccgttgttgtcaagaaagatgggttagctgctgggaaaggcgttattattgcagatactattgaagcagccagaagtgctattgagattatgtatggtgatgaagaagaaggtactgttgtatttgaaacgtttttagaaggtgaagagttctcgctaatgacatttgttaatggtgatttagcagtacctttcgactgtattgcacaagatcataaacgcgcatttgatcatgatgaaggaccaaatactggtggtatgggggcttattgtccagtaccacatattagtgacgatgttttaaaacttacaaatgaaacaattgcacaacccattgcaaaggcaatgcttaatgaaggttatcaattcttcggtgtattatacattggtgctattttaactaaagatggtccaaaagtaatagaatttaatgcccgttttggtgatcctgaagctcaagtattattaagtcgcatggaaagtgatttaatgcagcatattattgatttagatgaaggaaaacgtactgaattcaaatggaaaaatgaatctattgtaggggtcatgttggcatcaaaaggatatcctgatgcatatgaaaaagggcataaagtaagtggctttgatttaaatgaaaactattttgttagtggattaaagaagcaaggtgatacctttgttacttcaggtggtagagttatacttgccatcggaaaaggtgacaatgtacaagatgcacagcgagacgcatacaaaaaagtatcacaaatacaaagtgaccatttattctatcgtcatgacattgcgaataaagcactacaacttaaataagtaaatttaaaatactaagattagctatgaacgaatctataacgatagattttttcatagcttttttagttgtagagtctaggacattgatttctgtaccaaatttgtgattatgcatatgtaatacaaaagaggcgccacaacatgtttggatgaacaaaataacatgtttgtggcacctcttttgtttagtatggaataaatggttttctttttctatacaatgaatttctaatttagtatctatacaattatggataaaatttaacctacacgaccaagacgaacatcatctatgcccgtgatgggtaaggtgattgaacaataatatgccatagtaataatggcaattaaaactataataaagattatatctttatatgagaaaggtacgttgtaatagtaagtacgaggaccatctctaaatcctttcgactccatcgcaactgataattgatgtgcctttctaatattttggcttaatagaggtataattaaatgcttaaatcgctttaaccctctataatttgccgcgtctatcatctgatagcgcatttttaaagatctgcgaagctgtattaaagaactaatcattaaaggtatcatacgaatggcagccatgaatgcataagcaacttttgatttaacctttaaatgttgcattaaactataaaatatcatgacaacctgagatgtaagtgcgattaagataccgaaaaatgaaatagcaatggttcttaatgatacatgtaaaccacgaactaaactttctgttgtaatatggataaatccgaatttcaaaattgtatggctaccattcccgtataaaatcatgaacagggaagagagtaatgcaaagccaatacttatagttataaaaattgctgtaattttaaactgagtaccattaaacatcaataagaaaactaacattaagatagtgatataaagcataaaatcgaaattatgcacaaatataataaagaaaaatagtataattccaagaaatagtttcgttataatgttgacatcatcaacaaatgattgccgaactttccattgctcatacattcgtatcaccatcacaatctagtaacgcaccatctgaaattttaagtcttcttgatggataacgttcaattatttcatcgtcatgtgtaaccatgacaatactttgtcccaaattaattcgcttttggaaaagtttgatcaactggaatgtattatggctatcaagtccaaatgtcggttcatctaaaaagataatatcagctttagaacttagtgcggtagctacgctaaggcgtcgtttttgaccaatagacaactcataaggatgttgatcttttacattttgtaaatctaaaagttttaaaagttgtatcgtttcatcatcactttgatctttagaaaggtgattaaaatgaatgttaatttcatcataaaccgaatttgttataaattgtaattctgggttttgataaactaggtacatgtgttttgctgcatgtttaatttttgttaaacgctgattttcaaaataaacatcaccttgatatttaatcaattgcataattgattcaagcaaggttgttttaccactaccatttgcccctgtaattgtaatccactcacctagaccaatttctaaatctgagaatgagagcaatgttgatttaccgcgaataatacgtccatttttaaattgtaataagtgtgagtttgttgttggaaagtcaacacgacttggtgcgaattcccatgcacgtggatgccacacaccatattcactgagtaaatgaacatacttctgtaatatgatttcaggacattcatcggcaatgatatttccgttataatccatcaaaatgacgcggtcgacatgattccagatgtgtttaactttatgttcaacgattacaaccgtttgatcttcccaaagttcaattagtttagtccataaatcttctgttgcttgaacatctaacattgctgtcggttcatctaaaaacaatgtttttgattgttgaagaatggtttcaacaattgccaatttctgtttcatcccgccacttaaatctttgatatacgtttcaggggtaacatttaaattgaccatatttaaagcattgataattaacgcatccatgtcttcacatggtaattgtctattttctaaaacgaatgcaagttcttcgtatacttttggcatacaaaactggctatcagggtcttggaaaataacgccacttaatgggtcaacgattagttcatcatatttcataggtaattcaattaaattaggaacaataccacttaatacattcagaagtgtacttttaccgcaaccagaaggaccgagtaaaagtactttttctttgtcttgaatagtgatatttaaatgatcgaaaattttacgttgaccacttggatattttaatcgtaaatcacttacttttaacactctgaatgctcctcttataagttgtcgtaatcttctttagcagctggtctaaataattttgttacgcctgtcttatctaaagcttttactaaaaggtaagataggacgccggcgactactgcaccactaattaatctaaatacgatgaataatgttaagttccaacctgcaacttcatttaaataaccatagaaataatctatcgggaaagccgcgattgctgtacaaaaacctgctaacatagctaccataactgaacgtgattgatatttaaaaattgcaaagacaagttcacacgctaaaccttgtataaaagcgtaaacgattgtcggaatatcgaaacgacccataatgatagtttcgccggcacctgcagcaaattcagccagtaaagcaatacctggttttggaataattagatagcagacaatcgctgccatgaaccaaaccccgtttgttaattgttcgaggtgaaggcctgtagcttgcacaccattgtaaacaaaccaccataaattgtaaataactgcgaatactactgaaataagtacggttactagtatttcagatagctttaaaccttttgacatttttacatcctcctaataaaaaaacgcacaaccatccataggaaagttatgcgttcacaatatatattagtaaaacatatgtatagtaacactttcctacgctagttcaagctagatcaggttcaaagggtttgagggcaagcctcatctcagtataaaacacccctagtgtgtgcgatttatttaattaattatactgtaagacgtttgtaaacttatgtcaataggttgtcttcatgaaatttcgtttaattcgatttaaaatttataatattagcattggatttaaattgaagatgtagtaggaatgttagtaattaaagatataaaaatatgtgacatgtaataatattgagctgataaatgaagagggatacttatcaatcatacctctttaacaacagtgaagaacccgtgcataatggcttacgaattatagtttataaggaagaagagggatacatgcgccgagcacatgcataaaagcccctaacaactaaaagttgtaaggaaggagagggatacatgcgccgagcacatgcataaaatcccctaacaactaaaagttgtaaggggatttaaattaatttagtgtatcttggatatcttgttttgtttgattaatatcttctgttttttcttcttttttatcttttaatttttcttcaacttctttagctttttctgctgcttttttattttgattttcattagacatgattaattcctcccaaattggataattatttatatataaatcttacccggttgtactttcgttaaacttttctaagtctatagcactatttattcatttatctaaagacaacaacattagattaatatataatgattttgaggtgaacataatgtcttttcttaggaaacacgccgaaattatttttagctatttaatcggtatcgtttcactcttcactggtctcattattttaattaacttgccattaattaaacaattaaatggtggtaaaaaagttgatacacatgttcataatgtgtgggaatttctgaatgcatttttcagtgaaattattaaagtaatgagtcgatttataggtaatttccctatagttagtgcaattgtgataattatattcggtattttagttatgttgattggtcatacattacttagaactattaagtatgactatgatatttctatctttttcttagttatcggtatcatgtactttattattactcttatattaatgactcaagtttatggattctttgcagtgattttcattattccatttacaattcatataggatatatcgtctataaagatgaattgaatcaggaaaatgtaaaaaatcatttcatgtggataattgtgagttatggtataagttacttaattacacaaattgcattgtatggcagaattgatgctaatgaaatagagtcaattgatatcttaagtgtcaatgctttctttataattatgtggttacttggtcaaatggctatttggaatttcttgttcttgcgccgagctttacctttaacaaagcaagaattaggtgaagaggagccagaattatcaagaacaagtaaagggaatgtcacgaatcaaactaaaattcacttgaaacaactccaagataagactacagaatatgcacgtaagacaagaagaagtgtcgatttagataaaattagagctaaaagagataaattcaaaaagaaagttaatgatattatcgatattcaagaagacgatattcctgattggatgagaaaaccgaaatgggttaaaccaatgtatgtcgaactattttgtggtgtcgtcatctttttattcacatttttagaatttaataatcgtaatgcattatttgtatctggtgattggaaattatcacagacacaatatgttattgaatgggttacattattaattctgttattcattattatcgcatatatcgctacaacgttaactttccacttgaaaggtaagttttattatttacaattatttatggggagcattttattctttaaattgttaacggaatttataaatataatgattcatggactattactttcagtgttcattacgccaacattactattaatgttattggcaatcatcatttcttattcgttacaattacgagagcgaccataattaaaagcattataaaagtactatctattaaacattttgatgtgtacgctataagttagatatatctctaacttacttagatacaggtcaatgaagtttatggatagtactttttttgtaactagatttgattgattcaggtgatgtgaattaagtattgaaaattgtatacaaagttttagtgcaaataaaatagttgaaaagttatccatttgtaaaatcaagaaaactagtaaatagttgaagcgacttatggaatttgcgaaacgatatatagtatttcctttgtagaaatttaacatatatcattcgaattactaatttgttaaaatcaacagtaagattagaagtagatgatattgaaatttggcaaacaatttaatctatataaaactacaacgaaacacagaaaggaagttgtcagatgaaaatagcaactctgaacaaaggcaaagaaacaaaatattttaatggatatcctttaattgaagaagaggatatctattcacaagatcatttaaaagaaggagatatttttcaaattgtgactgataaatcacaatatgtcgcaacggcttatgttggtcgccaacataaaggattaggttgggttctaacatacgataaagctcaacaaatcaacacagctttctttgtaaaattgtttaatactgcattagcagaacgtgattattattttaatatagatggaacaaatgcttttagattatttaatgctgaaggtgatggtgttgggggattaacaatcgacaattacgatggtcatttgttgattcaatggtactcaaaaggtatttataaatttaaatatgccattcttgaagcggttagaaaagtatttgattataaatctatttacgaaaaagtaagatttaaagacagcgaatatagtggtggttttgttgaaggagatgcacctgagtttccaattgttatcgaagaaaacttcacattttataatgtagaccttgaagatggtttgatgacaggtatctttttagatcaaaaagaagtgcgcaagaaattaagggatcaatatgccaaagaacgccatgttttaaacttatttagttatacaggtgctttttctgcaatagcagcaagtgaggcatcttcaacaacaagtgtagatttggctaatcgttctcgtagtttaactgaagaaaattttggattaaatgctattgatcctaaatcccaatatatttatgtcatggacacttttgatttctataaatatgctgcacgacatggacatagttatgacacgatcgtgattgatccacctagctttgcgcgtaacaaaaaacgtacattttcagtgcaaaaagattatgacaaattaattaatggcgtcttaaatatcttatcatctgaaggaacattattgttatgtacaaacgcaagtgtatatccattaaagcaatttaaaaatactattaaaaagacgcttgaagagagtggcgttgattatgaattaactgaagttatgggattaccaaaagattttaaaacgcatccacattataagccatctaaatatttaaaagctgtttttgtaaatattagacattaatttgataaaaaggggtatagtaacttattgagaaaaagaagggtgataatattatgggattcaaaaacaatttaacatcaaatttaacaaataaaatcggtaattcagtctttaaaatagaaaatgttgacggaaaaggtgcaatgccaacgacgattcaagaattgagagaaagacgacaacgtgctgaagcaattgtaaagagaaagtctttaatgtcatcaacaatgagcgttgttccaattccgggtttagattttggtgttgatttaaaattaatgaaagatattatcgaagatgttaataaaatttatggtttagatcataagcaagttaatagccttggggatgatgtgaaagaaagaattatgtctgcagcagcaattcaaggtagtcaatttattggtaaaagaatttcaaatgcatttttaaaaattgtaattagagatgtagctaaacgtactgctgcaaaacaaacaaaatggtttcctgttgtaggacaagctgtgtctgcatctattagttactattttatgaataaaattggaaaagatcacattcaaaaatgcgaaaatgttattaaaaatgtcatgtaggtgctataatagttttgcaatttgcaaattttactgaaaccggttttaaacgaattgaatttaaagcatggttttggtaaagttaatgtataaaactaagttagtattgtaataatattgaagattctaactatacgaaggagaaatgtaattatggaacaaaattcatatgtaatcatcgacgagactggtattcacgctagaccagcaacaatgttagtacaaacagcttcaaaattcgattctgatattcaattagaatataacggtaagaaagtaaacttaaaatcaatcatgggtgttatgagccttggtgttggtaaagatgctgaaattacaatttatgctgacggtagtgatgaatctgacgccattcaagcaatcagtgacgtcttatcaaaagaaggattgactaaataatcatgtctaaattaattaaaggtattgccgcatctgatggtgtcgcaattgctaaagcttatttattagttgagccagacttaacattcgacaaaaatgaaaaagtcactgatgttgaaggagaagttgcaaagttcaatagcgctatcgaagcttctaaagttgagttaactaaaattagaaataatgcagaggttcaactaggtgctgataaagctgctatctttgatgcacatttattagttttagatgaccctgaattaattcaaccaatccaagataagattaaaaatgaaaacgctaatgctgctacagcattaacggatgtaacaacacaatttgttacaatttttgaatctatggataacgaatacatgaaagaacgtgcggctgatattcgcgacgtttctaaacgtgtgttatcacatattttaggtgtagaattaccgaatccgagtatgattgatgaaagcgttgttattgtagggaatgacttaacgccatctgatactgctcaattaaataaagaattcgtacaaggttttgctacaaacattggcggaagaacaagtcactctgcaattatgagtcgttctttagaaattccagcaattgttggtacaaaatcaattactcaagaagttaaacaaggcgacatgattatcgtagatggattaaatggtgatgtaatcgttaatccaactgaagatgagttaatcgcttatcaagataaacgtgagcgttattttgctgacaagaaagaattacaaaaactacgtgatgctgatactgttacagttgatggtgttcacgcagagcttgctgcaaatattggtacacctaatgatttgccaggtgttattgaaaatggtgcacaaggtatcggcttatatagaactgagtttttatatatgggtcgtgaccaaatgcctacagaagaagaacaatttgaagcttataaagaagtattagaagcaatgggcggtaaacgtgttgttgtacgtactttagatataggtggagataaagaattatcatacttaaacttgcctgaagaaatgaatccattcttaggttaccgtgcgattcgtttatgccttgcgcaacaagatattttcagaccacagctacgtgcattattacgtgcatcagtttatggtaagttaaatatcatgttcccaatggttgcaacaattaacgaatttagagaagctaaagctatattattagaagaaaaagaaaaccttaaaaatgaaggtcatgacatttcggatgatatagaattaggaatcatggtagagatacctgcaacagcagcattagctgatgtctttgctaaagaagtagatttcttcagtatcggtacaaatgatttaattcaatacacattagctgctgaccgtatgtcagagcgtgtatcatatctataccaaccatataacccttcaatcttacgtttagttaaacaagttattgaagcgtcacataaagaaggtaaatggacaggtatgtgtggtgaaatggctggagatgaaacagctattccattattgcttggtttaggtttagatgagttctctatgagtgcaacgtctattctgaaagcaagaagacaaattaatggtttaagtaaaaatgaaatgactgaacttgctaaccgtgcagtcgactgtgcaacgcaagaagaagttattgaattagttaacaactacgtaaaataattaattctttcgaaagacagaattataaataaacccgaagtattcattgtaagtaattatgaatacttcgggttcttttttatgatttatgttaatttcaatggaatgttgttgctaactaattaaacaactatgtgtcattaacaaaatgtagttctttaattaatgttagttaatttaaaaatcgatatttaatttatgatagctataaatgatgaagttgatttagatgaaaattaatcttggatatttaatactttgttgatttcatcaagatcaacatggtacattggattgccattcaacaaaataaacggagttgaaaaagcatcaaaatctatcatttcgtttcgatattgttgattgttgatatttctctcttcaaaatcaatgtgatgctcatttagataattttttacaaatgtacaaggtggacaatcattctgcgtataaacgattatttctgacatgtatcatgctccttcgtgctttattctaatgtaatatacacaattatacattgaaattcaaatttgtgaacacattgtgaactgacataaattatacacaatttcatagcgcataatgttttaaaaatacacattatagcaattataattaagttcattgtgttgtcatcaaaaaaagaaaaaggtgatgtttttaaatggatacagttgaaatcagtcggtttttgacagctatgactttagcagttcatatcatttttgcaacgattggtgttggtatgcctttaatgttcgcaattgcagaatttttaggtattcgcaaaaatgatcttcaatatatagctatggccaaaagatgggctaaagcttatacaattactgtagcagtgggagttgttacaggtacaattataggacttcaattatcattgatttggcctacatttatggaaatgggtggacacgttattgcacttccattatttatggaaacatttgcgttcttctttgaagctattttcttaagtatatatttatatacttgggatcgttttaaaaataaatggacacatttcttaattagtataccagtaattattggtggctctttctcagcattcttcattacttcagtgaattcatttatgaatacgcctgcaggttttgagttgaagaatggaaagatggtcaatgttcaacctatagaagcgatgtttaacccatcgtttatagttcgatcatttcacgtaattactacagccggtatgacgatggcatttgttattgcatcaatagcagcttttaaattattgcgtaatcgtcaacctaaagatactgtctaccataagaaagctttgaaaatgtctatgatagttggattcttttcaacattactttctatgttggcaggggatttatctgcaaaatttttgcataaattccaacctgaaaaattagcagcttatgaatggcatttcgatacatcttcccatgccaaattattattatttggtgtgttagatgaaaagactcagcaagttaaaggtgcgattgaattacctggactattgagtttcttagcagataatagtgtcaaaactaaagtacaagggttaaatgattttccaaaaagtttacatccgcctatgatcgtccattatttctttgatttaatggtaacgatgggaattttatgttttgtcatttcaggtgtttatgtcttaactttaatgtttaaaaagcttagaaagttttctactcataaatggatgctttatggaatattattaacaggcccagcttcaatgctagctatagaatttggatggttcttaacagagatgggtagacagccttggattgttcgtggttatatgcgcgtggcagaagcagcaacacaagcaggcggaataaccttcgttacaattttatttggcatattgtacatcattttaatgtatacatgtgcatacgtattaattcgtatgtttaaaaataaaccggcgtatgaagatgtaaatcgtttagccaagaagcaaggaggagaaatagaaaaatgatttatgcatttataggtataacagtgttatggttgtttttattttgctatatcattattgcttctatagattttggggcaggtttcttcgcattgcattcaaagttaactggtgatgaaaagaaaattaatcacttaatttcacgttatttaaacccagtttgggaagttacgaatgtattctttgttttcttcttcgtaggattcgtaggtttctttccagagtcaatcaaatatttaggcacggtattgttaataccaggttcaatagcactgattatgatatcgttgagaaacagtttttatgcatttgaaaattatggtcaagatacaaaattagcatggatgatcatgtatggggtaagtggattattaattccagcttcattatctactgctttaactattacagaaggtggctatattaatgttcgaaacaatgttatcgatctagattgggtgcagttattattaagcccatttgcttggtctgtagtattcttggcaattatttcagttttatatatttcatcaggatttttgacatattatgctaaaaaagcaaatgacgaaccagcatataatttaacaagacaatggcacatatttttagggccgccgatgattatcatttgtttattcgtatttctatcattacgcattcaaaattctgaacatttttattcagctgtttttgactattggtggatgtttggtataagtttcttattctttgcattagcttcattgttaacattctttaagaaaaaacatggtttggcttttgtatttgttattttacaaatgatgttcgcgttctttggctatggaattagtaaattgccataccttttatatccgtttgtaaaaattacagatgcatatgttaatccagaaatgggctggacattagtgattgtctttattttaggtttacttttattacttccatcgttaatattattattaagattatttgttttcgacaaagaatatgttgaaggaaagaaatcataagttgagacgataccccaactttcatttacttgcattactgcatttagataatttagttggggtactcatttataataattttaaatttatattttcaatgaattgatgaaaatcatttaatggagggcgagtatgggtaaagaatatgtagtcatcggtctaggtcgttttggaggtagtatcgttcgtgagttgaatgcattagacatggatgtaatggccatcgaccatgatgaaaatagagtgaatgaatatagtgatatcgctactcatgcggttgttgcagacactacagatgaagcagttatgaaaagtttaggtatccgtaactttgatcatgtcattgtggcaattggtgaaaatattcaatcaagtacgttgacgactttaattttaaaagagttaggtgtaaaaaaagtaactgctaaagcacaaaatgattatcatgcaaagattttaaataaaattggagcagatacggttgtgcaccctgagcgtgatatgggtagacgtattgcgcataatgttgcgagtgcaagtgtacttgattatcttgagttggcagacgagcattctattgtagaattgaaagcaactgaaaagatggcggggcagtctatcattgatttagatataagagcacaatatggaattaacattattgcaattaaacgaggcaaagagttcatcatttcaccaaatccaaatattaatttagaaataggtgatattttaatcatgattggacatgataatgatttaaatcgctttgaaaaaaatattgcgacgagataatcgggagtgggacagaaatgatattttctcaaaatttatttcgtcgtcccaccccaacttacattgtctgtagaaattgggaatccaatttctctttgttggggcccacaccccaactcgcattgcctgtagaatttcttttcgaaattctctatgttggggcccctgactagaattgaaaaaagcttgttacaagcgcattttcgttcagtcaactactgccaatataactttgtagagcattgaacattgatttatgtctcaagctcatcatatataaagaaaaagctactaacaatgggtggtgagtttaattaaaacttcacttcaaagttagtagctttttgattatttattgtttgattctttttgttcgtttaccttcataatgactggtaaaatcattggttttctagctgttttttcaaataaataaggttgtaatgtttcaatgatagaagatttaatctgatgccattgaatatctttattttgatttaacttactaataacatcagttttgattttgcgttgtgcatcataaattaattgacctgattccctcatatatacaaatcctcgagaaataatgtctggaccagaaagtaatttatttgtattaaaatcaatactaacaacaacgataactaaaccttcttcagataatagcttacggtctcttattacaacattaccgatatcaccgataccactaccatcaacaagtacattaccagatggaatgcgaccagctttacgtgctgaatcgtgtgttaaagctaagacatctccaatatcaaagatgaagacattatcttcttcaacgccgcattcaacaccagtctcaccatgtgcttttaacatacggtattcaccatgaataggtaagaaatatttcggcttgattaatcgaagcattaattgttgatcaccttgagaaccatgccctgaagtatggatgttagaaatcttgctatggataacatctgcaccagctttatacaaggaattaatagttctgttaatactttttgtattacctgggataggtgatgaactaaatacaacggtatcttcaggtataattttaatttgcttatgagtaccattagcaattctagataatgctgccattggttcaccttgtgaaccagtacatagtatcaataactcatgcttcggtacggtattaattttattaggttcaataaatgtttcaggtggtgctttaatataaccaagttccatacctattttaatattgttttccatcgaacgaccgaacgtaacaattttacggttatttttgatagcagcttcaactgcttgttgaactcggtaaatattagaagcgaaggtagcaaatataatacgacctttacaattacggaagatcttatctacgttttgaccaacttcacgttcgcttaaagtaaaatcaggcacaagtgaatttgttgagtctgaaagtaaacatagaacgccttcttcgcctaattgagccattttagcaatgtttgctggtttgcctacaggtgtaaaatcaaatttaaagtcaccggtatgaactacttttccttcaggtgtatctacgatgacgccataagtttcaggaatactatgtgtagttaagtagaaagaaatcgtaaagtgcttagatttaatcacactgtcctcattgatttcatttagtttagcagtacgtaataaatgatgttcttcaagtttattacggattaaacctaatgctaaaggaccaccataaataggtatattaagttgttttaataggaagggcacaccgcctatatggtcttcgtgaccatgtgttataaataggccaacaattttatcttggttttgaactagatatgtgtagtcaggtataacataatcaatccctaataagttatcatcagggaatttgatacctgcatcgataatgacaatttcgtctttatactcaactgcataagtatttttaccgatttcacctagacctccaagtgcatatacacctacttcatttggatgtaattgtttcattatttagcaatctccacattaaagtgttctgagttttctttttcgtaatctaaatgtgcgccctctaatttagtgataaattcgatattaaaattacgatctttcaagtaacgacgtacttgttcttctgtttgagcttcaacataaagtgattgtgtattttcacgcacaattacctcgtctctgttatgttgataaaaaactttaaatactgccatgttaaaaattcctcctaagaatgtttgtttaatttattgttaaccctagtaaaatcgtattggagtatatatcgataaattcattccaatcatctctataatgtaacttaataacgatttggttaataactaggttcatcatgtcgttcattttaaaaaattagtgaaataacactaaaatttcagttaaatcttattttacatgatgaatgataataaataaagcagtttatctcactagaaatctaagtatttcgaataaatgtgcagttctatttattaaaataaatgtagagattataaattaatgttaagaaagaattaaaggattttatatgaaacggtaaaatttaaatgaggggataaaaagtttggtagaaaggtgaatatatttaactgttgtttattcgaaaaagttgtaaaaggaaaagcttaggacatcatatttatcctaagctttgataattagaaaaatgtgttttaaacttctactgcatctgtatgtggttgtaatgggtgatctttgtcaatgtgatcatagaacattacaccatttaaatggtcaatttcatgttggaaaacaattgctggatatccttttagtcgtaattgtatatcattaccttcgatgtctttggctttaattgtaattctattatgacggtgaactagaccagcaacattatcatcgacactaaggcaaccttcaccagttggtaaataagcttcttgaacgctatgacttacaatttttgggttcacaagcatatagtcataagatttgccactgccatcatctggtattaaaacagcaatcatacgtttagaaatattaatttgaggtgcagccaaaccaacgcctgaacgtaaaccatatcgtttcgcgatttcctcatcttgactatttactaaaaactctctcatggcgattaatgtttctttttcttctttagttaatggtaattctaactcagctgctttttgacgcaaagttggatgaccatctctaatgatgtctttcattgttaacatatattgcaccttccttattttaatttgttttagttgaatgacagtaaaaaggttgttaagatactcatacatttttatgtgtaaatatctacaaagttaaccaactactgccaatgtttattttagatagtatatgtaaattttcagatatgctaattgcttaaaaaatgattaaagtgttggtttcaagcaatgatactttagaaatttatttatcatcttgactttaaaaattatattataaatgacgtaactgtcaacagatatacttagtaatgaagatgtgtaatgtaattgtttaaaattgatttccaagcagattttatttatcatttaatttaaatagcaagtggaggtacaagtaatgaaatttggaaaaacaatcgcagtagtattagcatctagtgtcttgcttgcaggatgtactacggataaaaaagaaattaaggcatatttaaagcaagtggataaaattaaagatgatgaagaaccaattaaaactgttggtaagaaaattgctgaattagatgagaaaaagaaaaaattaactgaagatgtcaatagtaaagatacagcagttcgcggtaaagcagtaaaggatttaattaaaaatgccgatgatcgtctaaaggaatttgaaaaagaagaagacgcaattaagaagtctgaacaagactttaagaaagcaaaaagtcacgttgataacattgataatgatgttaaacgtaaagaagtaaaacaattagatgatgtattaaaagaaaaatataagttacacagtgattacgcgaaagcatataaaaaggctgtaaactcagagaaaacattatttaaatatttaaatcaaaatgacgcgacacaacaaggtgttaacgaaaaatcaaaagcaatagaacagaactataaaaagttaaaagaagtatcagataagtatacaaaagtactaaataaggttggtaaagaaaagcaagacgttgatcaatttaaataattaatataatacagatggtaggaaacaactaatacagttcctattatctgtatctttttttattaaaacagaactttttcaaatggtttaacagtcccatttatttgtggtacaattagtaaggataaaatgaatttctatacaattatgggaaaggtatggtgaattgaatggctcctaagttacaagcccaattcgatgcagtaaaagttttaaatgatactcaatcgaaatttgaaatggttcaaattttggatgagaatggtaacgtcgtaaatgaagacttagtacctgatcttacggatgaacaattagtggaattaatggaaagaatggtatggactcgtatccttgatcaacgttctatctcattaaacagacaaggacgtttaggtttctatgcaccaactgctggtcaagaagcatcacaattagcgtcacaatacgctttagaaaaagaagattacattttaccgggatacagagatgttcctcaaattatttggcatggtttaccattaactgaagctttcttattctcaagaggtcacttcaaaggaaatcaattccctgaaggcgttaatgcattaagcccacaaattattatcggtgcacaatacattcaagctgctggtgttgcatttgcacttaaaaaacgtggtaaaaatgcagttgcaatcacttacactggtgacggtggttcttcacaaggtgatttctacgaaggtattaactttgcagcagcttataaagcacctgcaattttcgttattcaaaacaataactatgcaatttcaacaccaagaagcaagcaaactgctgctgaaacattagctcaaaaagcaattgctgtaggtattcctggtatccaagttgatggtatggatgcgttagctgtatatcaagcaactaaagaagcacgtgaccgcgcagttgcaggtgaaggtccaacattaattgaaactatgacatatcgttatggtcctcatacaatggctggtgacgatccaactcgttacagaacttcagacgaagatgctgaatgggagaaaaaagacccattagtacgtttccgtaaattccttgaaaacaaaggtttatggaatgaagacaaagaaaatgaagttattgaacgtgcaaaagctgatattaaagcagcaattaaagaggctgataacactgaaaaacaaactgttacttctctaatggaaattatgtatgaagatatgcctcaaaacttagcagaacaatatgaaatttacaaagagaaggagtcgaagtaagccatggcacaaatgacaatggttcaagcgattaatgatgcgcttaaaactgaacttaaaaatgaccaagatgttttaatttttggtgaagacgttggtgttaacggcggtgttttccgtgttactgaaggactacaaaaagaatttggtgaagatagagtattcgatacacctttagctgaatcaggtattggtggtttagcgatgggtcttgcagttgaaggattccgtccggttatggaagtacaattcttaggtttcgtattcgaagtatttgatgcgattgctggacaaattgcacgtactcgtttccgttcaggcggtactaaaactgcacctgtaacaattcgtagcccatttggtggtggcgtacacacaccagaattacacgcagataacttagaaggtattttagctcaatctccaggtctaaaggttgttattccttcaggcccatacgatgcgaaaggtttattaatttcttctattagaagtaatgacccagtcgtatacttagagcatatgaaattgtatcgttcattccgtgaagaagtacctgaagaagaatatacaattgacattggtaaggctaatgtgaaaaaagaaggtaatgacatttcaatcatcacatacggtgcaatggttcaagaatcaatgaaagctgcagaagaacttgaaaaagatggttattctgttgaagtaattgacttacgtactgttcaaccaatcgatgttgacacaattgtagcttcagttgaaaaaactggtcgtgcagttgtagttcaagaagcacaacgtcaagctggtgttggtgcagcagttgtagctgaattaagtgaacgtgcaatcctttcattagaagcacctattggaagagttgcagcagcagatacaatttatccattcactcaagctgaaaatgtttggttaccaaacaaaaatgacatcatcgaaaaagcaaaagaaactttagaattttaatacattttaaaagttaacgaagttagcgtattttagtctcattgattaaaatgaaatgtttaatttacgaaatcttaggagggcaaaaacgtggcatttgaatttagattacccgatatcggggaaggtatccacgaaggtgaaattgtaaaatggtttgttaaagctggagatactattgaagaagacgatgttttagctgaggtacaaaacgataaatcagtagtagaaatcccatcaccagtatctggtactgtagaagaagttatggtagaagaaggtacagtagctgtagttggtgacgttattgttaaaatcgatgcacctgatgcagaagatatgcaatttaaaggtcatgatgatgattcatcatctaaagaagaacctgcgaaagaggaagcgccagcagagcaagcacctgtagctactcaaactgaagaagtagatgaaaacagaactgttaaagcaatgccttcagtacgtaaatacgcacgtgaaaaaggtgttaacattaaagcagtttctggatctggtaaaaatggtcgtattacaaaagaagatgtagatgcatacttaaatggtggtgcaccaacagcttcaaatgaatcagctgcttcagctacaagtgaagaagttgctgaaactcctgcagcacctgcagcagtaacattagaaggcgacttcccagaaacaactgaaaaaatccctgctatgcgtagagcaattgcgaaagcaatggttaactctaagcatactgcacctcatgtaacattaatggatgaaattgatgttcaagcattatgggatcaccgtaagaaatttaaagaaatcgcagctgaacaaggtactaagttaacattcttaccttatgttgttaaagcacttgtttctgcattgaaaaaatacccagcacttaacacttcattcaatgaagaagctggtgaaatcgttcataaacattactggaatatcggtattgcagcagacactgatagaggattattagtacctgttgttaaacatgctgatcgtaagtctattttccaaatttcagatgaaattaatgaattagctgttaaagcacgtgatggtaaattaacagccgatgaaatgaaaggtgctacatgcacaatcagtaatatcggttcagctggtggacaatggttcactccagttatcaatcacccagaagtagcaatcttaggaattggccgtattgctcaaaaacctatcgttaaagatggagaaattgttgcagcaccagtattagcattatcattaagctttgaccacagacaaattgatggtgcaactggccaaaatgcaatgaatcacattaaacgtttattaaataatccagaattattattaatggaggggtaaaacatggtagttggagatttcccaattgaaacagatactatagtaatcggagcaggtcctggtggatacgttgcagcaattcgtgcagctcaattaggacaaaaagtaacaatcgttgagaaaggtaatcttggtggtgtttgcttaaacgtaggatgtattccttcaaaagcattactacatgcttctcaccgttttgttgaagcacaacattctgaaaacttaggtgttattgctgaaagtgtttctttaaacttccaaaaagttcaagaattcaaatcatcagttgttaataaattaactggtggtgttgaaggcttacttaaaggtaacaaagttaacatcgttaaaggtgaagcatatttcgtagataacaatagcttacgtgttatggacgaaaagagcgcacaaacatacaactttaaaaatgcaatcattgcaacaggttcaagaccaattgaaattcctaatttcaaattcggtaaacgtgttatcgactcaacaggtgctttaaacttacaagaagtaccaggtaaattagttgtagttggtggaggatacattggatcagaattaggtacagcatttgctaactttggttcagaagtaaccatccttgaaggtgctaaagatatcttaggtggcttcgaaaaacaaatgacacaacctgttaaaaaaggtatgaaagaaaaaggtgttgaaatcgttactgaagctatggctaaatcagctgaagaaacagataacggagttaaagttacttatgaagctaaaggcgaagagaaaacaatcgaagctgattatgtattagtaactgtaggtcgtcgtccaaacacagacgaattaggcctagaagaattaggtgttaaattcgctgaccgtggattattagaagttgataaacaaagccgtacgtctatcagcaatatctatgcaattggtgatatcgttccaggtttaccacttgctcacaaagctagctatgaagctaaagttgctgctgaagcaattgatggtcaagctgctgaagttgattacattggtatgccagcagtatgctttactgaaccagaattagctacagttggttattcagaagcgcaagctaaagaagaaggtttagcaattaaagcttctaaattcccatatgcagcaaatggtcgtgcattatcattagatgatactaacggatttgttaaacttattacacttaaagaagatgatactttaatcggtgctcaagtagttggtactggtgcatcagatattatctctgaattaggtttagcaattgaagctggtatgaatgctgaagatatcgcattaacaatccatgcacatccaacattaggtgagatgactatggaagcagcagaaaaagctatcggatacccaatccatacaatgtaataactgattatctataaagattcagtcattaaaagctgtagcatatgctacggcttttttgttttaggtaaagtaatgtaaggaaattgatttgagatatcgttaacatgtgacatgcatgttatactagcgatgctaacaaaagaattgaaatggagggttcaacaatggaatatgagtatccaattgatttagactggagtaatgaagagatgatttcagtgataaatttctttaatcatgtagagaagtattatgaatccggcgtgacggcaggcgactttatgggtgcatataaaagatttaaagaaattgtgcctgctaaagcagaggaaaaacaaatttttaatactttcgaaaaaagtagtggctataatagttacaaagcagttcaagatgtaaaaactcactctgaagaacaaagagtaacagctaaaaaataattcgttcgaaattaacacaatttaataggaatttttctttaaaactattgctaataaagctatattttgatacctttatcaaatgttaaacaaaatgtttgataaaagtaaacttaatatagcttttttaggtggaaaaataaatgaacataggtaataaaattaaaaatcttagaagaattaaaaatttaacgcaagaagaacttgctgaacgtacagacttatcgaaaggctacatttcacaaatagaaagtgaacatgcctcaccaagtatggaaactttcttaaatattatagaggtgttaggaacgacgccaagtgaattttttaaagacagtgaaaatgaaaaagtattatacaagaaggaagaacaagttatttatgatgagtatgatgaaggttatatattaaattggttagtttcaaagtcaaatgaatatgatatggagccattaatattaactttaaagcctggagcatcatataaaaattttaatccatcagagtctgatacgtttatttattgtatgtcaggtcagataacacttaatttaggcaaagagatatatcaagcacaagaagaagacgttttgtattttaaagcacgagataatcatcgtttgtcaaacgaatcaaacaatgaaacacgaatacttattgtagcgacagcttcatatttataggggggatcttatttggaaccgttattatcattaaaatcagttagtaaaagctatgatgatcttaatatcttagatgacatagatattgatattgaatcaggatacttttatacattattaggtccttcaggttgtggtaaaacaacaattttaaaattaattgcagggtttgaatatcctgacagtggtgaagtgatttatcaaaacaaaccaattggtaatttaccaccaaataaacgtaaagtgaatacagtctttcaagattatgcattatttccacacttaaacgtctatgataatatcgcttttggtttgaaattaaaaaaattatcaaaaaccgaaattgatcaaaaagtaactgaggcattaaaattagtaaaactttcaggttatgaaaaaagaaatattaatgaaatgagtggcggacaaaagcaacgtgttgcaattgcacgtgctatcgtaaatgaaccagaaatattattgttagatgaatctttatccgcattagatttgaaattgcgtactgaaatgcaatatgaattacgagaattgcaatctagattaggtattacatttatatttgtaacacatgatcaagaagaagcgttagcattaagtgactttctttttgtattaaaagatgggaaaattcaacaatttggcacaccaacagatatatatgacgaaccagtgaatcgatttgtagctgattttattggagaatctaatattgttgaagggcgcatggttagagattatgtcgtgaatatttatgggcaagatttcgaatgtgtcgatatgggtattcctgaaaataaaaaagtagaagtcgttattcgaccagaagatatatcattaatcaaagctgaagaaggattatttaaagcaactgttgattctatgttatttagaggggtccactatgaaatatgttgtatagacaataaaggttatgaatgggtaatacaaacgactaaaaaagctgaagtaggcagtgaagttggtctttattttgatcctgaagccattcatattatggttcctggagaaacagaagaagaatttgataaacgtattgaaagctatgaggaagtagacaatgcgtaatactaataaatttctcttaatcccgtatttactatggatggttatatttattattgtaccagttgtattactcatttatttttcatttttagatatcaatggacattttagtttcacgaattatcaacaaatttttactacaaaatatttgaaaatgtttgcatattcaattttatatgccgcttcaataacaattattaccttgactatcagttatccagctgcctattatattactcgttcgaaatttcaaaatatcttattaatgataatgattattccaacatggataaatttattgttaaagacatatgcttttataggtttattaagtcatgatggcgtgattaatcaatttttccacttatttaatttaccatcattcaatttgttatttacaactggtgcgtttttagtagtggcaagttacatttatataccatttatgattttacctatatttaatagcatgaaagcaattcctaataatttattgcaggcctcaagtgatttaggtgccagtcctttctatacttttagaaaagtaatcatgccgttaacaaaagaaggtgttatgactgggattcaagtaacctttattccatcactttcattatttatgattacaagattaattgcaggtaataaagtcataaatataggtacggcaatagaggaacaatttttaacaattcaaaattatggtatgggatcaactatagctatattcttaattgtatttatggcattcattttaatcattacaaaatcatctaatgggagagggtgaatcatatgaaatggtatggaaagctgtatatcgggatacttttagcgattttatacatcccaatattctttttaatgttctattcattcaattcggctggtaatatgattcactttgaacattttacattagagcattatcaatcattatttcaaaatgatcatttaatgtcggtcatttttaatacgatagctgtagcacttttagcagcctcaatttctacagttattggtacatttggtgccattgctatttattatttaagaaataaaaagtttaaagtaactttactaacattgaataatgtcttgatggtatcatccgacgttgtcataggtgcatcattcttaattatgtttacaacgattggccattttactggtcttggtttaggattttggacagttctaatatctcatattgcattttgcatacctatagttgtgattatcgtcttaccacaactgtatgaaatgaataataatatgttaaatgctgcaagagatttaggagcgactgaaccacaattattaagcaacattattattcctaatattttaccttctattataggaggattctttatggctttaacttattcactagacgatttcacagtaagtttcttcgttactggtaatggctttagtgtgttatcagttgaagtttatgctatggcgagaaaaggaattagtatggaaattaatgcgatttcaacattattgtttgctgttattgtattaggaatactaggatattatttgattcaatacgtgataaataagaaaaaactaatcaagcgaggtgtaaaataatgaaacgatttttacaactcattataggtgcattagttgtgggtatgctttgtcttactttaagtcattggtttaaatctaaagaacaagtgcatacaaatcaaaaaatttacgtatacaattggggcgaatatattgatccagagttaattaagaaatttgaaaaagaaactggcattcaagtcgtttatgaaactttcgattcaaatgaagcgatggaagccaaaattcgcaatggcggtacacattatgatgttgcttttcctagtgaatatacagttcaaaaattgaaaagagatcatttattgttaccaatagatcataataaggtacctaatattaaaaatttagattcagattatatgaatatgtcatttgatagaggcaataaatattctttaccttatttctttggaactgtaggtattttatataataaagaaaagtatccaaatgaatcatttgatagttggaagtcattgtataatcctaaatttaaaaaccaaattttactagttgacggtgctagagagattataggcatgagtttgaataaacttgggtataatcttaatgaccgtaattcgcaccatttaaaagaagcagagcgagatttaaccaaactagcaccacaagtaagaggtgtcgtaggtgatgaaattaccatgatgcttcaacaaaatgaaggtaacatagcggttgtttggagtggtgttgcagcacctctagtgcaagaaggggataaatataattatgttattcctaaagaaggatcgaatttatggttcgacaatatggtaattccaaaaacggcacaaaataaagagggtgcatataaatttatgaattttttattagatgctaaaaataacaagcaaaatacagaattcgtaggctatgcaacgccaaacaaggctgctcgacaattgttgcctaaagagattaaagacgaccatcgtttttatccgactaagaaagagcaagaacgccttgaagtttataaagatttaggacctgaagttttaagtgaatacaatgaaaactttttgaatttcaaaatgtcattaaaataaaatcataaatagtagttatttactgtatatttagttataataacgggataagtactataaggagttgtaacgaatgactggagaacaatttactcaaattaaacgtccagtaagtagattaactgaaaaagttctaggttggttatgttgggtgatgttattagtgcttactgtcattacgatgtttatagcacttgtttcattcagtaataacacatcgattgctaatcttgaaaatacattaaacaataatgcatttatccagcaattattagctggaaatggctataatacaacacaatttgtaatatggttacaaaatggtatatgggctattatcgtttactttattgtttgtttgttgatttcatttttagctctcatatctatgaatataagaatcttgtcaggtttcttattcttaatatcagcaattgtaacgattcctttagttttacttatcgttactttaatcattccgatattattctttattattgcgatgatgctatttataagaaaagataaagttgaaatggttgcgccacaatattatgaagagtataacggaccgatttatgattatcgtgaacctgtgtatgagcgcccccaaccgaaagatgattattatgatgtgcctaaatatgaaaaagaattggataaatcaaatactgtatatgatcaagaacaggaaagagataaatatgatcaatttcctaaacgtgcagttgaaagtgaatataatcatgatgagcgcactgaggaagaaccatcagtattatccagacaggctaaatacaaacaaaaaagtactgaagaactaggtattgaagatgatggttattatgcagaacctgaagttgatccaaaagaattgaaagcacaacaaaagcgagaaaaagctgaaattaaagctaagaaaaaagaaaaacgtaaagcttataaccaacgaatgaaagaacgtaggaaaaatcaacctagcgcagttagtcaacgtcgaatgaattttgaagagcgacgtcaaatttacaacaatgatatttctgaagaacgcaattcaagtgaagttaaggacaaaaaagagcaagaataaatattgatgatacccagattagtaagcagaggtcttttgcttattaatctgggtttttatatgaggttaattatcgataacgtttaattaaagtgtttaggtgtcataattttaaatgacgatttctcattactatacacctaaattatcatcaatctgaattcagatgtttattataaaaattagatgaaaaatatgttaatatacaagtaatttaatgtgcgtatatctataggctcgtagtatacttattaaaatattaaacaaagaaaggattttaagatgaatagaaaacctgaattaatcatggcttggattgcaaatagtattagtattatttatttattagttatggggctatcctatttttctttaaaaagtggtaatgcatcacaacgtgaagaattagcgaagcaattatctcagaacggtggcaaggtttctttagatatgcttcagacaacaatgggtgcattagcaattattttattaatttcaacactttatggtatatttgcgacaatttgtattaaaggacgtagaaaattatcgattatactttttgttatcgcgataattgtaagtttgatggctcttaatttaattgcaattgtcttatgggttatcgtgatgattatgttgatttctaaaaaagaatcaaaagaaacaacacataaggacgatgagtatatttatcattaatatgttcatagcaaaagaaaaaccattaaaatgttaagttgttaattattagatacaaccaacattttaatggttttatttttaactttgtagttcttggaatgtttgaacgattaaatagacatttaaaatacttagaataataataagtgtccatgaaatgatattaacccatgttttattatagaaaggtcccatcaagtctttattactagtagccaattgtaatggtattaaacagaatggcagagcaatacttaaaaatacttgagagaatacaagtagttgctcaattttagctgcattacctttaaaaatgattaagcatacgataacaggaatgacagcaagagaacgtgtaattaaacgtcttaaccaatttggtatgtgtaatcttaaaaatccttccattacaatttgtcctgctaaagtaccagtaatcgttgaattttgacctgacgctaataatgcaactgcaaataatgtactcatgattgcacccattgttgcacctagtacaggttcagtttttaaggcgtgatataaatcatagaaaccacctaaatcgtcagcatttgagttgaaaaatagtgatgctcctaacactaataataagcaattgactacaaatgcgattgataactgaatgttcgaatctatcgtagcaaatttaatcgcttgcgctttttcttcattgttatgtcttgagtatgttctagattgtacaattgatgaatgtaagtacaaattatgaggcataattgtagcgccaataatacctaatgcaatatagagaatgccgttatttgtaatgatttcactatgtggtataaatccatttaacacagcattcaactgtggtgatgaaatatagacttcaaatataaagatgaataacactgtgaaaattaatgtaccaacaatagcttcaatttttctaaaaccatatttcattataaaaagtagtaaaaatacatcaagtacagttattagtgcaccgacgattaaaggtatgttaaataggagattaagagcaatagcactaccaataacctcagcaatatctgtagcgataattgctagttctgcaatgatccaaaagattatagcaataggtcttgataaataatgtcgtgtcatttgagctaagtccatacctgttgctattcctaatctcactgtcatgctttgaagtaacattgctgataaacttgaaataagaattacgaatagcaaagtatagccatattgggcgccaccttgcattgatgttatccagtttccgggatccatgtaaccaacagcgactaataacccaggtccaagaaatgataaaaatttctgtttatttgaactgcgatgatcgaatttaattgtattgtttatttcgtctaaacttaattgttcatttgttgaatgtcgtttattattcattttgactcacctctacttcttatggacaatataataacctaataaaatggttaggtcaacctaaatttattttaatttttttaaaagtatgaattattatgttgaacgttcgatttaatattaagaaaaaagagcacgaaatcatggatgtgattaagtgctctattatttaaacaaagttatttatgcagaataaaatggcaagaactgatcgaaggtttcttctaaaaatgcaataaatgctttgtcactttttaatcttttatcttgtggtgtgattgcacgcgctataaagaattcaccttttttcacattgatggctctttgtatcgcttctattaaatcatcatccgttaaatctttaataaatggtttatcaggtttcatatgatctaagcaaacacgataatcatcaggtaattgttgaatagctttaaattttctttcaaaaacttttgcacgtgttgctttatcttttgcttcatgcatgattccaaacataacaaacagttgatcttcaaacataccaatttggaaatgaggtaacattttatagcctcttttgtttgttgcaaaagcaacccatgtatctttaggaggattcacacttcttctagcatgctttgctacgtgaggataaaatgtttcaccagtttgacttgtaaagaagtcactaaaatattctcctaattcacggagttgtggtcgtatgtattcgtttaaagcttccattcgtgcgtctaagccttctacgttgaacgctttgaaatctttaggtttaaatgtatattttgtcatagagtacctcctgtatagtgtttaaaaatattgtagcatatgttttatcaattgcggcttaagacgctctcattaaaattagtattttcatttttatcataagaagttatttttataaaatgttgatgtataataaagatgttaggagatgatgttatggcactttatggatttgcccaaggacttattcaagaagcaggaattagaattaaacaattgatggagcaaaatttaacaattgaaacaaagtcaaatccgaatgaccttgttacaaatgtagataaagcaacagaagatttcatttttgatacaattttagaaacatatcccaatcatcaagtattaggtgaagaagggcatggtcatgacatcgatacttccaaaggtacggtatggattgttgacccaatagacggtacattgaattttgttcatcaacaagaaaatttcgcaatttcaattggtatttatatcgatggtaaaccttatgcaggttttgtatatgatgttatggctgatgtcttatatcatgctaaagtaggggaaggtgcatatcgtggtagccaacccttgaaaccattgaatgattctaatctaagacaaagcattattgggatcaatccgaactggttaactaaaccaattttaggagaaatctttaaagaaattgttaatgattctagaagtgcaagggcatatggtagtgcagcgcttgaaatcgtttcagttgctacaggtaatttagaagcatatatgacgccaagacttcaaccatgggattttgctggcggattggttattttatatgaagtaaatggacaagcttccaatttactaggagaaccattaacaattagtggtccaaattcaatcttagttggaaatcgtggtctccatcaagaaattagcaatgattatttagagccccaccatgatgcgttaatacaattacatgaacaacgatttaaaagaaaatcaaaataattaccaaaagcgtaatatgtagtcctaacaattaggtaacatattacgcttttataccttaaataataaaaacacgcgccaatataaaaccagttaaatgttcatcatgaacatgtgtggtcttaaatcaacgcgtgttattgtcgatataacttatagccaatcgttttctcgatattttttctttgtagtaaatccaattccaaaggttgcaacgagtaatataaatgttaaaatcatcattggtacatttgatgcaccaacagcaaaactaaataatactaagaaaacaacagctaatatagaaaatacccaaaagatatttttagattttttttgtttcatcctatccccaccttttgcttatcttttctcaattatatgatataataaaaaagttgtaattaaaagtgggattttacttaagaaagaaggaaactatttatatgactaataaaagagaagatgtccgcaatatagcaattattgctcacgttgaccatggtaaaacaactttagtagatgagttgttaaaacaatctggtatattcagagaaaatgaacatgtcgatgaacgtgcaatggactctaacgatatcgaaagagagcgtggaattacgattctagccaaaaatacggctgttgattataaaggtacacgtattaatattttggatacaccaggacatgcagactttggtggagaagtagaacgtattatgaaaatggttgatggggttgtcttagtagtagatgcgtatgaaggtacaatgcctcaaacacgttttgtacttaaaaaagcgctagaacaaaacctgaaacctgttgttgttgttaataaaattgataaaccatcagcacgtccagagggtgttgtagatgaagttttagatttatttattgaattagaagcaaacgatgaacaattagaattccctgttgtttatgcttcagcagtaaatggtacagctagcttagatcctgaaaagcaagatgataatttacaatcattatatgaaacaattattgattatgtaccagctccaattgataacagtgatgagccattacaattccaagtagcattgttggactacaatgattatgttggacgtattggtattggtcgtgtattcagaggtaaaatgcgtgtcggagataatgtatcactaattaaattagacggtacagtgaaaaacttccgtgtaactaaaatctttggttactttggattaaaacgtttagaaattgaagaagcacaagctggagatttaattgctgtttcaggtatggaagacattaatgttggtgaaactgtaacaccacatgaccatcaagaagcattgccagttctacgtattgatgagcctactcttgaaatgacatttaaagttaacaattctccatttgctggccgtgaaggtgactttgtaacagcacgtcaaattcaagaacgtttaaatcaacaattagaaacagatgtatctttgaaagtttctaacacagattctccagatacatgggtagttgctggtcgcggtgaattgcatttatcaatccttattgaaaatatgcgtcgtgaaggttatgaattacaagtttcaaaaccacaagtaattattaaagaaatagatggtgtaatgtgtgaaccatttgaacgtgtgcaatgtgaagtgccacaagaaaatgcaggtgctgttattgaatcattaggtgcacgtaaaggtgaaatggttgatatgactacaactgataatggacttacacgtttaatctttaatgtaccggctcgtggtatgattggttatacgactgaatttatgtcaatgacaagaggttacggtattattaaccatacatttgaagaatttagaccacgtattaaagcacaaattggcggtcgtcgtaatggtgcattaatttcaatggatcaaggttctgcaagtacttatgccattttgggacttgaagatagaggtgtaaacttcatggaacctggtactgaagtttatgaaggtatgattgttggtgaacataatcgtgaaaatgatttaactgttaacatcactaaaacaaaacatcaaactaacgtacgttctgcaacgaaagaccaaacacaaacaatgaatagaccgcgtattctaacattggaagaagcgttacaattcattaatgatgatgaacttgttgaggttacaccagaaagtatacgtttaagaaagaaaattttaaacaaaaatgttcgtgaaaaagaagcaaagcgtatcaaacaaatgatgcaagaaaacgaataatttaacataataaaagagaagctgagcgatgaaagttgcttagcttctcttttggcatataatatttgaaaaagtgtttaaatgctattatttcctgttactttcacattttcaaatttctaacttgtttattcagatattcatcgagcggatagtgttgcgcacgttgtttaggtgtgtctaatcgacttttacaatcatcacacataaatgttcgaataggattgtttttaagtcgtttagactcagttgtgcgctcatctataaatacttttgcatcacagataatgcattgcacttgtctcaaattaaatcacctcaatatgagttacatggttgattcgatatgaataaccatcttcttgattgtaaataaaactatctacaccattatcgctgtaaagtcgtttaccgtcttttgcaaattggaaaaataaatagggtaatagatctatcggtatatctaaatgatcatgctcatttgataatcgaatagtagttgcagagtcatgtggttcggaatgtttgaaaaatggtgtcatattaatgacaaatgaaccttctaacatggcacgttttttatattttatttctgaatttaaagtaggcggattagtttgtccttctaggatagcacgattccattcatgattatcttcaaagtcgattggttttgaaccatcaaatacacctttttctaaatcttcgatgctaacttttctatcatcgaaaatccaagtcgtactatctaatgttataggaaactttacggctcctttaatttgtatcattttcccactccctatcaatgtatatagcattattttaacacaaattgctaacgacacattttaaatctacttgctttttaatatttagtaagataaacttttagtaagacttgagaatttatatagagggggagcgtgtcatggcgaaacaagcaacaatgaaaaatgcagctttgaaacaattgactaaagatgctgatgaaatcttgcatctgattaaagttcaactagataatttaacattaccttcatgcccattatatgaagaagtactagatacacaaatgtttggacttcaaaaagaagttgattttgctgttaaattaggtttagttgaccgcgaagatggcaaacaaattatgttacgtcttgagaaagaactttcaaaattacatgaagcttttacacttgtttaaggtttaatatataagcatattaaaatggcgtgagatatcgacaattgagctgcgccgattttatatttatagtttaattactgattaaagtggctgttatgttgtcttcttgatgacatgtcagtcacttttattgggttttagcaattcacgatattaagtaaacaaatattctataaattacctcaagagacctgttaatatttgtgattatgactgtgtcatgtatataataagtaacatggatttttaaaattaaagtataaaacgaaatcatttgaagtataaattgtagaattggatgactgaatatatgaagaattttagaagtattttacggtatattggtaaaacctcaaagtttattgattatccgttattagttacatatattgtattgagtttaattggattagtgatggtatatagtgcaagtatggttccagcaactaaaggcacattgactggtggtatcgatgttccaggaacgtatttttacaaccgacaattagcatatgtcataatgagttttataattgtattttttattgcatttttaatgaatgttaaattactgagtaatattaaagtgcaaaaaggtatgattataactatcgtctcactattattactgacgttagtaataggtaaagatattaatggttctaaaagttggataaacttaggatttatgaacttacaggcatctgagttattaaaaattgcaatcatattatatatcccatttatgatcagtaaaaaaatgcctagagtattaagtaaaccaaaattaattttaagtcctattgtattagcattaggttgtacgtttttagttttcctacaaaaagacgtagggcaaacattactaatattaattattttagttgcgatcattttttattcaggaattggggtaaacaaagtcctaagatttggtataccagcagtgctaggattcttagtagtatttgtcattgcattaatggctggttggttaccaagttatttaactgccagatttagtacgctaacagatccattccaattcgaatcaggaactggataccatatttccaattcattgcttgcgataggtaacggtggcgtatttggaaaaggattaggaaatagtgcaatgaaattgggctatttaccagaaccacatacagattttatttttgcaattatttgcgaagaattaggtttaatcggaggattgctagttattactttagagttctttattgtatatcgtgccttccagtttgcaaataaaacatcatcatatttttataaacttgtgtgtgttgggattgccacatactttggaagtcaaacgtttgtaaacattggcggtatttcggcaacaattccattaactggtgtgccattgccatttatcagctttggtggatcatcaatgattagtttaagtattgctatgggtttacttctgattgtaggtaaacaaatcaaagtagaccagcaacgaaagaaacaacaacaaaaagttgatataagaagacaatttaattaaaaaaatactagccaatatttagtacgagatgacttctgtcattaagcaatgctaaacattggctatttatatactctttgtcaaattggactgatgagttcaataacggaagttaggcaaccaaacaacgcttaacttcctttttgttttgatattacgagattactcatgattatcaaattttataaacaaaacaacgtataattataactaaattttatgactaaaaattactaaatgtggtggcgaaattagaatcatgatgataagataaagttatcgctattgataataaatgttgatgttttgcaattttatttttaattttttagagttgtagaaatcgaaaatgtttcacaacaaaaacgtgaactacctgttgttgcatagtcatttttgaaattattatttctgaagcggaggttttaattgtctcaagaatgttaaattttgaaaatttgaaacataactatagcaaaacagagcgctttaagataaaattttattatctaattagttagaaaattctaatagtttgaggagtgtatcgctattgaaacaaataaaaaagttacttgttgctaaccgtggagaaattgcaattcgtatattcagagcggcggcagaattagacatcagcacagttgcaatttattcgaatgaagacaaaagttcattacatagatataaagcagatgaatcctatttagttggaagtgatttaggtcctgctgaaagttatttaaatattgagcgtatcattgatgtagcaaaacaagcgaatgtggatgcgattcatcctggctatggatttttaagtgaaaatgaacaatttgcgcgtcgttgtgcagaagaaggaattaaatttattggtcctcatttagaacatttagatatgtttggagataaagttaaagctcgtacaacggctatcaaggcagatttaccagttattcctggtacagacggtccaattaaatcatatgaattagcaaaagaatttgcagaagaagctggtttcccgctaatgattaaagccacaagtggtggcggcggtaaaggtatgagaatcgttcgtgaagaaagtgaattagaagatgctttccatagagcaaaatcagaagctgaaaaatcatttggtaatagtgaagtttacatagaaagatacattgataatccaaagcatattgaagtacaagtcataggtgacgaacatggaaatatcgtacacttatttgaacgtgattgttcagtacaacgtcgtcatcaaaaagttgtagaagttgcaccatcagttggattatcatcaacattacgtcaacgtatttgtgatgctgcaattcaattgatggaaaatattaaatatgtcaatgcaggtactgttgaatttctagtatctggtgacgaattcttctttatagaagttaaccctcgtgtacaagtagagcatacaattacagagatggtaacaggaattgatattgttaagacacaaattttagttgcagcaggtgccgatttatttggtgaagagattaatatgccgcaacaaaaagatattacaacattaggctatgccatccaatgtcgtattacaacagaagatccgttaaatgatttcatgccggatactggaacaatcattgcttatcgttcaagcgggggctttggtgtacgtcttgatgctggagatggtttccaaggtgctgagatatcaccttattatgattcattactcgtaaaattatctacacacgcgatatcatttaaacaagcagaagaaaaaatggtacgctcattacgagaaatgcgtattcgtggtgttaaaactaatattccattcttaattaatgtaatgaagaataaaaagttcacaagtggtgattacacaactaaatttattgaagaaacaccagaacttttcaacattcagccgtctctagatagaggtactaaaacattagaatatataggtaatgtaacaattaatggtttcccaaatgttgagaaacgtccgaaaccagactatgaattagcatcaattccaactgtatcttcaagtaaaatcgcttcatttagtggtacgaaacaattgcttgatgaagtaggtccaaaaggtgtagctgaatgggttaaaaagcaggatgatgtcttactaacagatacaacctttagagatgcacaccaatcattattagctacacgagttagaactaaggatatgattaatatcgcatccaaaacagcggacgtatttaaagatggtttctcactagaaatgtggggcggtgctacatttgatgtggcatataatttcttgaaggaaaacccatgggaacgacttgaacgtctacgtaaagctattccaaatgtattattccaaatgttgttacgtgcttcaaacgcagttggttataaaaactatcctgataatgttattcataaattcgtacaagaaagtgctaaagcaggcatagatgtctttagaattttcgattcattaaactgggtagatcaaatgaaagttgccaatgaagcagtacaagaagcgggcaaaatctcagaaggtactatttgttatacaggtgacattttaaatcctgagcgatcaaacatttatactttagagtattatgtcaaactagctaaagagttagaacgtgaaggtttccatattttagcgattaaagatatggcaggcttattaaaacctaaagccgcttacgaattgattggtgagttaaaatcagctgtagatttaccaattcatcttcacactcatgatacaagtggtaatggtttattaacatacaaacaagcaatagatgctggtgtcgatatcattgatactgctgttgcttcaatgagtggtttaacaagtcagccaagcgccaattcgttatattatgcattaaatggcttcccacgccaccttagaactgatattgaaggtatggagtcacttagtcattattggtcaactgtacgtacttattattcagactttgaaagtgatatcaaatcaccgaatactgaaatttatcaacatgaaatgcctggtggacagtattcgaatttaagtcaacaagctaaaagtttaggtttaggcgaaagatttgatgaagtcaaagatatgtatcgcagagtgaatttcttatttggtgatatcgtaaaagtaacaccatcgtctaaagtagttggtgatatggcactttatatggtacaaaatgatcttgatgaacaatccgtgattacagatggctataaattagatttcccagaatcagtagtgtcgttcttcaaaggtgaaataggacaacctgtaaatggttttaataaagatttacaagcggttattttaaaaggccaagaagcactaacagctcgtccaggtgaatatctagagccagttgattttgaaaaagtccgtgagttgcttgaagaagagcaacaaggtcctgttacggagcaagatattattagttatgtactatatccaaaagtatatgaacaatatattcaaactagaaatcaatacggaaacttatcgttacttgatacgcctacattcttctttggaatgcgtaatggtgaaacagtagaaatcgaaatcgataaaggtaaacgattaattattaaactagaaacgattagtgaaccagatgaaaatggtaatagaacgatttactatgcgatgaatggtcaagcgagacgtatttacattaaagatgaaaatgtgcatacaaatgcgaacgttaagccaaaagcagataagagtaatccaagtcatatcggtgctcaaatgccaggttcagtaactgaagtcaaggttagtgtaggtgaaactgtgaaagctaatcagccgttgctaattactgaagctatgaaaatggaaacaacaattcaagcaccatttgacggtgtgattaaacaagtaactgtaaataatggtgacacaatagcgacaggcgatttattaatcgaaattgaaaaagcaactgactaaaatgattaaaataaaacgagattacacaacaattgacgtgtaatctcgtttttacatggcttaggtttaattttaaatattgatataaaaaaccgtaattttaatgggcgtgccattaaaattacggtttgcttttttgttattgcttgtcacttcttactgatcgtaacattagcatgataaagtatgttgtcataccaaataaataagtgataaataatgcatggaaaagtgcgattatcaggttaacatttgtcataatagataatgcacctgtgataacttgtaatataacaagtataaatgcagctgtataaccataatgaacagtacggttatttggataatttttaacagcgtgaatataagtaatcataataatcgtaaacactataaaagccatgatacgatgcgtgagttgaacccaatcttgttctgaatgtggtacaagatcgtggaatggcaatggccaaccaccatatgctaaacttgcatccgcatgtctcactagtgcaccagtataaacaccacaataaatgatgattgccattaaccatgttaaacgtcttaatggctttttgatatataattcgtcagcttcatatttttgatctatagagaaaataatcaatgttattaaaaatacagatgagaaactgattaatgatataccaaagtgcaatgctaaaacgtaatcgttttgttgccaaataacagcagcagctccgattaatgcttgcaataataagaatccaacactaatgattgataaaggtttaatttctttaatatagcctatatgtttccatgcagtgataactaaccataagaccattaataaagacaaagctgaaacggctctatgacttaactcaataatcgtatcaataggaaagaattctggaatcaacgcaccatgacatagtggccaagaagaaccacaaccatcagctgatccggttttggtaactaaggctccaccaagttgtacaaatgtcatcattaacgttgctacgacacctaaccattttaaattctttttgccaaacaatttatacaccccatcataaaaaaacgcatcactgagaattagaattaatagccggatttgagatgatactataaatagacctgattgtaggatatgaaaagatgggatccaacgcaggaaatatgatttaattttacaagtattgtatgtggacgacataaaaagaacttaatcgtaatgatttttttattgggataattatgtaatccacgtttactcaaatttgaagcttaaatattaatctcttttagatgcatgattctacttattaaaattttctaacatatacattatagcaataaattaaatgttatttgtgtcacaaaattgacattttctcttgtcgttaatttgtcacaatttaattttattaaacctagtctttttatgcaatctaagatatcataatcttatatgaacaaatttaaggagggggattatgagcaaagagcatactttgtcacaaaatattagcagagttaacttcaaagaattgcaacagataattaaaatgggacttgttcaaggtaacttaattccggcttttgcgggcgcatggctagcagttgtaatgacaaatcattccttcttatcatcaatacctcaaattttattaatgctatttggatctactttaattatgggtggcgcatgtgcgttaaataattattacgaccaagatattgatcgtattatgcctagtaaacaaaatagaccaactgtaaataatagaattacagatcaaaatttattactattaagttttggtatgatgttagttggagaaatttgtttgtttttattgaatataccatcaggcgtacttggtcttatggggattgtaggttatgtgtcttattactcaatatggtctaaaagacatacaacatggaacacagtgattgggagttttcctggagcagtaccaccactaattggatgggttgcaattgaaggacaaattagtttaacagcgattgcgctgtttttagttgtattttgttggcaaccaattcatttttatgccttagctattaaacgtaaagatgaatatgcacttgcaaatattccaatgttaccatcagttaagggctttaaacgtacacgtgtcagtatgtttatctggttgattattttattgccagtacctttattactaataaatttaggtgtcgtattcgtagtgttagctacattattaaatttaggatggattgcattaggtttaacaacatttaagaaaaattcagatcaaacaaaatgggcaacacaaatgtttatatattcactaaattatttagtgatctttttcgtgttagctgtgattgtttcattacttactttgatctagattaattaagttaggatgaaaaatatgggcgttccaattttaccaacgattagtacgacatgtattgtcattagtgcaattttaattgccattggttggagacttatttggaaaagggaaataaataaacacaaaaatgttatgttagctgcagctgtttttgctttaacttttttcttaatctatgcaagtagaacgatttttatcggtaatacagcatttggcggaccagcatcaattaagaaatattatacgattttcttatttttccacattaatttagcaacaattggtggtattctaggcctagttcaaattattactgcatttaaagataaatataatgtacaccgcaaattcgggccattcgcttcagttatatggttctgtactgcaattacaggtgtagcagtttacttattattatatgtattatatccaggtggagaaacgacatcactgattaaagcaacatttggtcattaatatgcttatacaaatgatactaatctgataaggcaatttgttttatcaggttttttgatgaagaatagtcggacagttgatggtattcatttgataccttaactgtccatttttttatacatattttaatcttaataatgaaattcaacctgaaaacataaagataggttatgatatagagtgtagggaaaatctttatgacgttaaaattatgcctgaagatgattttgttttatcgaaacgacacagttatgtcagtgttgaaaatttgctaattaatgtgttgttttttacaatagtattaatactttttaggtggttgattgatgaaaaagttaattataagagtcgtcggtgtattatttttagttggatttttaatatatcttttttattcaccgagattaaaatttgatgtattagagaacccgaataaaggtaataaagtaaatagatctgaacaggtgaataaatcaaataaccatgctgaaaatccaaagcctaaagaaggtgttggtacatgggtaggtaaagatattaaagtgcttacttctaaatttggacaagcagatcgtgtctacccttttagagatggttacaaaaattatgtgtttaaagacaaaaacagttattacattgtttcaactaaacgtgaagaaatcgtttcagtgtatgctacaggtgagaaagtcaatgttagtccgttaaaaataggacaacattctgcagaaatttttaatcatacaagtattaatccagaaccgtcctttaaagttgatggtaaaaaatatgaatttgaactttcagatgaagatttaaaaacacaaacactgattaaatatggcgacatatatgcacaagtgtattctgatcaacaatcgaaaaaggtgctaagtgtacgatttttaacaaaagaaatgttagcagatattgaaccttatcaattaaattctaattctacgtcagaagagcataataagcgtccagttgagcaaaatccaaatcaattaatttctctttatgaagtaacgaatgaaatgagaaaattaaaaggattaaaaccattgaaaatcaatagcgatttagcacatattgcatctaataacttatatgaagcgacctctaatggttctgatagtgttgaatttacagaggacgcattaagagggcaattagataaaaatcacgttacttataaaacaactgctcaaaatgttggttatgcgtttaatgatgtaccaacattaatccatagttggatgaattcagatatacatcgatctcgtctattaaattcaaaatacgatgagatgggtggagatgtaatgagagattattattcactaattttcttagaaaaataacaatgaggggtatttatgattaatgaagcttcactagcgatattagatgatattgatgaactagctgatatgatagttgcatcagatatttatgcatcatttgagcaagctaaacaggcgctcgaaaacaatgacgaagcacatttactttatcaatcatttttaaaatcaaaagagaaatatgatgaagtaatgcgattcgggaaatatcatcctgattataagaaagttatgttagagacaagacaacgcaaaagagcatatgagatgcttgacgttgtgatgcattacaaagctagggaaatggcacttcaacatttaatagatgaagttgttacgaaaattgcgtacgctgtttcagaacatgtcaaaatagaaacaggtaatccattctttcaaacatcacatagtggttgtgcgacgggcggatcctgtaattgttcattataaaaaacatcgagtcagaaaaaggtggttattgaaaccactaactagcatctgactcgatgtttttatttattcgggattgtttgtttgaattgttgtgctaaatctggtcgatctgtcacaatcgtgtgtgcacctttttggtataaatcattcatcagatttatactatttacgccataatagcctggaatgatattcatatcatttaaccatttgataaaacgagatgaagtcaaatcaatgcctttaaaatgagtaggcatttggaacgtttgtgctaatggttggtagtacctaccacctaataaatgatattttaaaaatgcttctgtaacttcctgttggctagcaccaattgcgacggatccttgtgcaattttattaaaacgaacgatttgttctttataaaaacttgtcacaagaacgcggtcaaatgcttgattttctgcaattgtatcaaacataatttgtggtgcgattgagccttcataggattcaggagcatcttttaagtctacgtttatatacatatcaggatattgcttcagcaactcatcgaaggttagtatagctgtgtgtgcatgaccacgatatggtgttagtccattgatatctttgaagtgataagctgcgtctaatttctttaattctgctaatgtatgggcactaacttttccagagccgttcgtcgttctatcaacagttgcgtcatgaaaaacgataagctgttgatcttttgtgagtctcacatctgtttcaaagccatcaacgcctaattgtttagcatagtcaaatgcaagttgcgtttgctctggtcttaaagccataccaccgcgatgcgcaaatatatatggtgcattgcctttgaaaaaagcagggatggtttgctttttagtaatcactttatttttattgatcattaatagactacttaaaaatccagcaccgactagtaccgcatttaaaatgtttctgtttacttttttcataaaaaattcctcctcgtttacttttatagcttaacaaattcatagttctgactacagcgaaatgtgtggttaatcatatagtgatgctcttgagaattgaattaatataatgatgtttaatataatctaaatacatttatcgagcaattacataagacataattaaggtagcttaatattttaaaattaataaagacatgatatgattaatgctgaaaataaatggagtgaggtttaaatgaatttaatcccaagaactagtattgtagtttatttaaaacatatgaaacatgaacgacaaatccgaaaatatggacatatcgtttattcaaatagagatcgtaaatttgtaattatgtatgtgaatgagcaagatgttgatcaaattgtacataaactaatgcaacttaaatacgttagacacattgatggctcaccatataaatacttaaagaaaacttacgaaaaagagaaacacgaaatatataattaatattattgaagttctggtatccatttttggagccttaacacactaattaaataattataatataacgataaatcatgaaatgcttgagggggctgtacatcgatacctaaaattggtatgtcgaatttttcagcacaatcatttatcatttgaaactttttatttgaatctggatatggatatttaatagcgtttatcatgatataaaatgcttggaaatgattgccagttgtagggttcataatgattgctacagatgactttttattttcagcttgtggtgaatgaaaatagataattttatcaatacgttgatggttatattcaatcatcgtcatgaattcgaacaaatctgttagaccttcaccaagtgtaataaatgtttgtttcattggtttatcattctcctttttctcaataaattatattaaataactaaatgaattggaagtgtgaacaacatgcgcgtcattgcaggtaaacataaaagtaaagctttagaaagtatggaaggccgtaatacgagaccaactatggataaagttaaagaaggtatctttaatagtttatatgatgtgtcaggtataggtttagatttatttgcaggaagcggggcgcttggaatagaagcactctctcgaggtatggataaggtaatctttgttgatcaaaattttaaagctgtaaaagttattaaatcaaatcttgcgaatttggatttagaggcacaatctgaagtttataaaaataatgcagatagagctttaaaagcattgtcaaaacgtgatattcaatttgatgtcattttcttagatccaccttataataaaggtctcattgataaagctttaaaactaatttcagagtttaatttattgaaagaaaatggtatcatcgtttgtgaatttagcaatcatgaagaaatagattatcaaccgtttaatatgattaaacgttaccattatgggttgacagacacattgttattagaaaagggagaatagcatggaacatacaatagcggtcattccgggtagttttgaccccattacttatggtcatttagacattattgagagaagtacagatagatttgatgaaattcatgtctgtgttcttaaaaatagtaaaaaagaaggtacgtttagtttagaagagcgtatggatttaattgaacaatctgttaaacatttacctaatgtcaaggttcatcaatttagtggtttactagtcgattattgtgaacaagtaggagctaaaacaatcatacgtggtttaagagcagtcagtgattttgaatatgaattacgcttaacttcaatgaataaaaagttgaacaatgaaattgaaacgttatatatgatgtctagtactaattattcatttataagttcaagtattgttaaagaagttgcagcttatcgagcagatatttctgaattcgttccaccttatgttgaaaaggcattgaagaagaaatttaagtaataaaaataacagtattttaggtttatcatggtttacaatcctaaaatactgttttcatttgttaacgatattgctgtatgacaggcgtgttgaaatctgtttgttgttgcccgcttattgcattgtatatgtgtgttgctttgatttcatttgtgaagtaatgtgcattgcttttgttaatattggttatatattgtctttctgggaacgctgtttttaaatgctttaaatattgtctgccacggtcgttcatcgctaatactttaactgcgtgaatgttactcgtaacatctgtaggtttaatgtttaataatacattcattaacagtctttggatatgcgtatatgtataacgctttgtttttagtaattttacaaaatgatgaaaatcagttgcttcataaatgttagatttcaaacgattttcaaaaccttcagtaacagtataaatattttttaatgaatctgtagtcatagctatgatttgatatttcaaatatggaaatatttgatttaatgttatatgaggtgttacgtacaagtgttgaatatctttaggtaccacatgatgccaatgatcatcttgactaatgattgatgttctaatagatgtaccacttgcaaactgatggtgttgaattaatgaatcatgatgttgagcattttctcgtttgatagaaattgcattgatgtttttagcatttttagcaattgctttcaggtaactaataccaagtatgttgttaggacttgctagtgcttcatgatgctctaataattcgctaatgatacgagggtagcttttaccttcttttactttttgtgaaaaggattcagattgttcaatttcattaatgctgtgtgctaattgctttaatgttttgatatcattattttcactaccaaatgcaattgtatcgacactcatataatctgcgactttaactgctagttcggcaaaatgatcgccagatgataaactggcagttgctggtagttcgataactaaatcagctgttgataatgccatttttgcacgagtaaacttattatagattgctggttcgccacgcatgacaaagttaccactcattattgcaatagtaacgtcagcatttgtaagttttttagattgattaatatgatattgatgcccattatgaaagggattatattctgtgattaagccaacgcttttcatttgcaattcgtcctttcggtattcattattaatattgtaacagaacatgatatgttaagaaaaaatcttgacaacttgttcttagaaagttaaaataaattttgtgcttgttagaggtgaagccatatgaaatggtcaattacgcaattaaggaaatatcaaggtaagccatttgaatttgatcaaacggtgagttttgacaatttaaaagaatcattagatttaattgatttatctccaattacaatccaaggtcagttaaccattaagtcaacagaagtcgttgcggatattcacattactggaacgtatacaatgccttgtgcacgtactcttgtaccagtaaaagtcccactagatgtaactactacagaagtatttgatttagaagggtacaatcagtataacgatgatcaagatgatgtagatgaacactatcacattattaaagatggtatggttaatcttcaggatattgtcgaggatatagttattattgagaaaccaatgagagcttattcagagcaaagtgaccaaatgttgacagtaggtaatggttgggaagtaatcgatgaggatcaattagatgagcttgctaaacagcaagaacaagatgattcagaatcacgacaagttgatccaaggcttcaaaaattacaacaattatatgataaagagcaataagtagtttaattaatgatataatgttgttaattaaactaacatttagtatttttcgtttataatctaaggaggatatatcatggcagtaccaaaaagaagaacttctaaaactagaaaaaacaaacgtcgtacgcatttcaaaatttcagtaccaggtatgactgaatgcccaaactgtggcgaatacaaattatcacaccgtgtatgtaaaaactgtggttcttacaatggcgaagaagtagcagctaaataattttagttactcaatataaaaagtcccgcttaaaatgattgttttaagtgggactttttatattgtgaaaaataattggcgaacgaggtaactgcatagttattccgaacttccaattaataaaactctatacccgtaatcttcaatgagttctggcgcttccctttaattccttttacatattcaaaatgaatgtttttgattgccatctttatgaattcagtttttaactcatcttccattaattcccagccgtttagcaatgaatacttgaaatttttaatcttctcatagttaaaagtcttacccttatcattatccttgcgcttttcatactcatgtatttctttgtcaatacgacttattattggaaaagcttcatccttatccatcataccttctataaaaagtgtttgacatctagcgcgttcttttcgcaacttttcaatatcgatgccgacatcttctatttctttaggttggttttcgattttatatgatgttaaatcaaattgttttagataattgtaaaattgttttaaaacctcgccttcgtcgatgttacatgcatttttatttttagtatttttgcagttagaacaaaagtatagtttagaataccaaacttctttatttttaggcgtatgcttgactgtgtttaaagtcaatttctggttacagtttggacataatagtttacttctgaaaatagcgttatgttttacgattgtagagttagttttttcacttatccttaattttatttcttcgtattcttcttcacttataatagcttcgtgggtgttttcgacgaatatgtcaccgaaaacaagatgacctctagctaccggactcgttagagcattgcctataactgatctgtgccagtttttacctaagggtgctttgtatttagagttgttcaattttatagttatttctcttaaactagtaccttttttcgcttcttctactgcaaatcgtaatacttttttatattcattaggcacaaatttatcgtttactctgtcgtaatagaaaggagggacagttttagctaacccttttctagctgatgcgcgtcgacccattgcagtacgctcttgaattgtagtacgctcccactctgccatagcacctactaatgttacgaacaaacgtcccatagcagaagttgtgtcatatacttctgttgcgctcctaaacaacacgtttttattctcaaacaattctagtatctctagtaagtctttaacacttcgagttaatcgatctagtttatagactaaaaccaaatcaaaattatctatttcattcaacatttcttgtaaagcgggtctgtcttttttagctccggagtatccagcgtcagtatatactttatgaattttccagtcgtttatgtcgctgtaagctcttaattttctttcttgttcttcgatagagtgtcctttttctttttgttcaagtgtactcactctagtataaattgctactttcatgtgctccctcctcaaaattggcaaaaaataataagggtaggcgggctacccgtgaaaattgtataaaaaaaagagagagcgcagatgcaccctctcatgtcgcaaatatttcagcgacttgtctaatttgaagcttgccgcaaatatttcagcggcttgttttgtatatatgtaatataccatcaaagagagtgtagttcaagcgatttaactaagaaatctaatttttatactattttcaattttatctactgtttcttttgaatatgatatttctccggcagggtcatacctattaattttcgatattctatccttgctgattgtagtgatatttaaaacgttagcataggtctttttatacttgaatcgctcatatcttttgcgaaccttcgaatattttttgaagtcgtcattcagcgatttgttttcatcaagtaatttttgatcgtatgggttttctgcttttgacaccttttcaagattgttcatgatttttttagctaaatccttacccgttacgtccattttttccaatactaaaggtaacaaatcttcttcgatatgcacattgaatttacttctggaagatgtaagtggaactaccgttaatattggatttttatttgaatcgtgattattaagtaccatacaaaaatggtttccagaaaactctctgccaacattaacacctaactttacataaattatagtgccttttttatatctggtgtaacttttgttttcttttaacaatctaacttcatccaataaaaactctgaatattcaagacaccatgaattcatatatttaaatttgtaaatctcgctattttgaatctttttaaaattattaactgctgtttctaaaggtgcgttctcttccatccctcatcctcctcacgccacacaagcgctattaatcaatatccaataattgttgttttttcttatcgaactcttcctgagaaattactccgacatctaataattctttatattttattaattcatcagcaacagaaaaactcattttttcagaattggatggtttcatagaactttctcgaatagagatttgttcttgtattgtttccgccattctagatacagtgttttttgatatgcttcctatagcgatacttgatgaaccgtgatgtataattatttcgccaaaaagaagtccttttttatacgaaacagaattgattttctcgaatggaaattcatgaaatttcaaaccatatatcatacctttatctaagaataacaatcttagatcagtacatactattaagtaggtattattattgtacaatcccgaagttacatacattatgttttcattatcttttaaaatcataggtagttctttcacttctttttttgtaccaaacaaatcctctacacctatttcgctaaatctttggtagattttagataagttttcgtcagatttattgatttcactttcaaatttcacttcttttctaggtttactttggtattcttttaaaatttctcttttgtcttcaacagatagttgcttgtattgtttcttttcttcttttgttttagttgctaaatattgactctcaatcatactttctttgaacgttaatctgctcttaggtaattctttcatgttcatttctcctttattttttgattgttaaatcgttagatcataagcatatttaaattcatttataaaatcagatttgctttccattttctcttctaaaaaacttaagtagttttctgcgtggtaattttcgttatttgacatatagtcgtttaacccattgtgtatatgtcttctgattacttttaccgctatatggatcgcttgaaaactcatttgatacttgtacgaaatttgctcaatattaaagttgtttatatatttgtatcttatatgtaaaggaaacaataaacatgaagcaaatgagtttgcttcatattcttcagcaatccttctataataatctttatatgtgaatgttttatttaaattaactccagtatgtcccattataaaatgaccatattcatgagctaaagtaaatcttagacgattcataggcagtaaatcgttataaactataatcgctttgtctccttttctaatatgaaacgcttcttctgaaccgaaaatagaaggtattttaaaatataaagtgccagtattctgagaaaattcagagaaagtcactaatttaatacgtttatcttttgagataatttcaaatatatctaaaggaaaagataagttatatagaccatttgtgatctcgtaaactgctttcgcagatttaaaaaaagatttttcataatttaatttcaattaaaaagcccctttgttacttagttaaatcatcccaatcatcaaacattgcttctaatatagtcaaagctttttgcctttgtgcctccgtcatattttctgtagctcgatgcataataagaatatcttcacttttatcttctccggagtactcatctttttctctacctaataagtaatcaactgatacatcgaagtgatcggcaattttttgcaccttatcaatgcctggtttggttttctcccatcttctgatttgtccgtttgaaaaccctaaagttctctctaattcagcaaaagtcataccttttgaattgcacaaattacggattctttgtactagattcataaatttctcctatcacagattaactttttcgctatttttgttgacaattagcataaaagttaatatactgtatttaagctttaaatttagcttactaaacacataacaattattcgttggggaacgagtattcaatacctttatgacaggcattacgaattgttataggtttattaaactatgcttaaatattagcataaaagttattggtgttcaacagataatttatttgcttagaaaaaatgttataggaggtgctaatatgtcgacaacagatttcggcttgaaagtgagaacggaattattaaaacgcaacatgacaaacaagcaacttgcggaaatgctagaaatttcaagtgcttacttatcggatattttacgtggacgtagagatgcttttgaacaaaagaaacgtattgcgaaaattttagaaattaaagaagaggtgaagagttaatgaatgaaattaaaactttcagtaacgacatgttttcaatcttaatcaaacaagataatgaaaataatttattcgatttagaaactgtcgcaaaaagtttggggttcactcagtttaaaaacggcaaacaatatattcgttgggaaactatcaataaatatttaggtaaatatctttcccaagaagttgggaaaggcgatttcataccagaaccaatggtatataagttggctttcaaagcaggtaatgctgtagcagaaaaatttcaagattggttggcgatggaagtcctaccagctattcgcaaacacggtatctacgcaacagacaatgtaattgaacaaacattaaaagatccagactacatcattacagtgttgactgagtataagaaagaaaaagagcaaaacttacttttacaacaagaaattggagagctaaaacccaaagcagactatgtagatgaaatcttaaagtcaactggaacattagctacaactcaaatcgcggcagactacggtatatcagcacaaaagttaaacaaactactacacgaagctagattacaacgaaaagtgaataaacagtgggtgctttactcagaacacatgggcaagagttacacagaatcagacactataccaattgtacgctctgacggtagagaagacacagttttacaaactagatggacacaaaaaggtagattgaaaatacatgaaatcatgactgaattcggttatgaagctaacgtaactgcttaacaggagggcgcagcaaatggaagatcaaaacaaaaaagtcatttattactactatgacgaagcaggtaatagacaactattatcaattggagatttgaaactctatttattaaaagatattaaatcaagatttggtttatataaaaaacaaatccctgatttagataatctgttcgttcaaatagacggtgttgaatttaaagtactataacccgagcaatgcacctcttaaacaacattatacacgaaaggagcataaacattatgcaagcattacaaacattttgtttccaataaaaaaacacacaccttgtcgtagaaggtatgtgttacggaaattttgtttggttctaatcactacgactaacagcacaatttttgctggtatcgtccccagccctgtatggtgcttaggttttccatcaaagtctagcgtcctaaaagttactaccttctagtacgcataccttgttaacgtctcagttgactgtggaacacaacaaacgatgttctaatttagacttactaacctataaaaccacaggatgatttaaaacctcgcataagcaaggaaatcacctcccagtgtagtggggttggattaattatataacgaaatatcgttatagacaataaggagtggtaagatgctgaacttaaaagaattgagagaagaaaaggggataacacgctatcaactagcgaagctaacagaattacaaaattcgacaattcaatctatcgaaacagaagttaaaaatcccggcttcctcacagtaaaaaaaatatgcgatgcactacaagttgatatcgctaatgtaaaggagaaataaaatgcaagcattacaaacaaaatcgaacatcggcgaaatgttcaatatacaagaaaaagaaaatggagaaatcgcaatcagcggtcgagaacttcatcaagcattagaagttaagactccatacaaaaaatggtttgaaagaatgagtgattacggatttgaagaaaatatcgattatgtagttacggacatttttgtccataacccactaggaggtcgtcagaatcaaactgaccacgcactcacactagacactgcaaaagaaatcgcaatgattcaacgtagtgaacctggcaaacgtgcaaggcaatacttcatccaagttgaaaaagcatggaacagtccagaaatgattatgcaacgtgctttaaaaattgctaacaacacaatcaatcaattagaaacaaagattgaacgtgataaaccaaaaattgtatttgcagatgcagtagctactactaagacatcaattttagttggagagttagcaaagatcattaaacaaaatggtgtaaacatcgggcaacgcagattgtttgagtggttacgtcaaaacgggttccttattaaacgcaagggtgtggattataacatgcctacacagtactcaatggaacgtgagttattcgaaattaaagaaacatcaattacacattcagacgggcacacatcaattagtaagacaccaaaagtaacaggcaaaggacaacaatactttgttaacaagtttttaggagaaaaacaaacaacttaataggaggaattatcaatgaacaaactatataaagcaaccttcctcatcacaatggcagttgcgacttggaaggtttggaagattgagaaaaacacaagatttaaacttagaaattttgattatccaaaaattaataatgctcagagcaaatcattgttggatattgctagtcacgatttaaaagatatttaactgtattcaaaattttcatatcttgttgagcttttaagctttcgtataaagctattgaataaataatttcgtaagatacgttttcaggagcatcttctttcaacttatttattctatctctaaaaaagtcactgtcaccaccgaattctttttcggcttgattactaagttcaccaaagaaattttgaaaatcattaaattccatacttatcacctcctttcactaggagataactaaattatacacgaaaggaatggtagaagtgccaccacacattcaacaaatgttatacgaaatccagttaaaagctggtatacctcaaaaattaatggaaatgcaaggtttgataaacgatgaaacaaccaaagaggagaaaaaagaaaatgagtaacatttataaaagctacctagtagcagtactatgcttcacagtcttagcaattgtgcttatgccattgctgtacttcactacagcatggtcaatcgcgggattcgcaagtatagcgacattcatattttataaggaatacttttatggagaataaaaaaactgctacttgcgccaacaagtaacagtgacaaacgattaacaaaattaattcgtgttcaatataaaacgaaaaaaggaggaagtcaagatgtattacgaaataggcgaaatcatacgcaaaaatattcatgttaacggattcgattttaagctattcattttaaaaggtcatatgggcatatcaatacaagttaaagatatgaacaatgtaccaattaaacatgcttatgtcgtagatgagaatgacttagatatggcatcagacttattcaaccaagcgatagatgaatggattgaagagaacacagacgaacaggacagactaattaacttagtcatgaaatggtaggaggcatgaaaagtgaatgaattacaagagagagaactagaaacatttgaacaagacgaccgattcaaagtaacagacttagacagtgctaactgggtctttaagaaactagatgcaatcacaactaaagagaatgaaatcaacgagttagcaaataaagaaattgaacgcataaacgaatggaaagataaagaagtagaaaaattacagagtggcaaagaatatttacaaagccttgtaattgaatatttcagaatacaaaaagaacaagatagcaaattcaagttgaatacaccttacggaaaagtgacagccagaaaaggttcaaaagtcattcaagttagcaatgagcaagaagttattaaacaacttgagcaacgaggttttgacaactatgtaaaggtaactaaaaaacttagccaatcagacattaagaaagatttcaatgtaactgaaaacggcactttaattgacgcaaacggcgaagttttagagggtgctagcattgttgagaaaccaacatcatacacggtaaaggtgggagaatagatgactgaacaacttaatttataccaaaaaatagcggatgttaaagcgaatattgcgggcttcacaaaagatactaagggatataacttttcgtatgtttcaggatctcaaatattacacagaataagagaaaagatgattgaacataatttattgctagtccccaatacgtcaaatgaaaattggacaacacatacttttaaaaacaaaaaaggtcaagaagtgacagaattcatagttgaaatggatttgaattatacatggattaatgctgataaaccagaagaacagtatgaagttagttatcatgcttacggtcaacaaaatgatatttcacaagcacatggaacagcgttaacttatgctgaacgctatttcttaatgaagttctttaacatcccaaccgatgaagatgacgcagacgcaaaacaaaaacaagataaatattcagcagtaagtcaagaacttaaagacatgctaactaaagaagcaaatgattttatagccatagctaaagaaagtggatttgctgaaaaacaccaagaacaaattaacaaattagaaaaaatgaacgtcgaaacactgaacaaaaaccaaatcaatgtaaccagacaacagataaaaaaatggcttggaggaattgaataatgaatacagtaaatttaattgggaacctagtggcagatccagaattaaaaggtcaaaacaacaacgtagttaactttgcaattgcagtacagagattattcaaaaataaacaaacgaacgaatatgaaacagacttcattcgttgtgttgcatttggtaagactgctgaaatcatcgctaataactttactaaaggtaataaaattggcattactggttcaatacaaaccggtagttatgaaaataatcaaggacagaaagtgtttactacagacatcgcagtcaacaatataactttcgttgaacgtaaaaacaacggtcaatctagcaaccaacaacaaaacagacaaactcaaactggtaataatccttttgataataccactgcgattactgatgatgacttaccgttctgattggaatgattagatgccaataattactagttatatcactcaagatgacggtacaacaacagttgtcatctcgggtgttgaattaggcaataaagaaacattactacttgataacggatttgatgtggaagtcgatgtaagcgtcatagatccgtttcaaattaccggcaagcaacgacgaaaaatattcgcgcttgtcaaagacatagaagaatatacaggtcaaccaatggactatatgcgacatatgttcatcgagtatgtaaggacttactacggctatgatgaacgtatttcactaagtaattgtacgagaacacaagcaagtcaaatcattgaagcaacgcttgactggacgttctacaatgacataccacttagctacaaaacaagcgacttgctgaaacaagataaatcgctcttatactggtcaactgttaaccgcaactgtgtaatttgtggaaagcctcacgcagacctagcgcattatgaagcagtcggcagaggaatgaacagaaacaaaatgaatcactacaacaaacatgtattagcgttatgtcgcgaacatcataaccagcaacatgcgattggcgttaagtcgtttgatgataaatatcacttgcatgactcatggctaaaagttgatgagaggctcaataaaatgctgaaaggagagaaagagaaatgaacaaaatattaatacgctttgctattaactatataaaatatcaacaaaaacaattgcgtgaaaaagaagcccgaattaaatatctagagggcttcttaaaagggaagggttattgactgtttttgttttgcaattccatcaatctttcaaattgatccggatactgaacggcaagttccatcattcttaccatagaatcagcgggaatatcagggtcttgtttggtcactgaaggtagaaactcttttaattcggataaatcgctttttatatctaacaaatgtctatttaaaacaccgtattcattatcgatattattatacttattgactggattttcaaaattgaaatcattatctgtaaatgttttgatggtttctttaagttggtctttggcatttactacatccgcgtataattcgctgtagtaaattgtacggtaagcgctaacatcaaaagggatattctcatctttgttaatcatagtaattgttggtctctctagagcgtgtctgtaacctaattcataaaatacgttcgggttatgcgtactcaaatctacaataactaattcagaattcgttaatccaccaattatttcatcagtgattttattggtcgatgatataaggtcagatcgttggatttcaaaatctgattctaaagcaggttttatgatggattgtaaaagaaaatcagagtttcttcttactttagaatcatcagtacctatagggcaagcaatgaaacattttttcaagttattcactcctaatcatatttttattaattataacagaaaggagataaaaaaatggcaacatttagaacgataaaagaaagtggcgattttgtaactgtgcataaatcttttgtgttcgatagtaatttaagtgctaaagctaaagggatattattgtatttcctgagtcgtcctgacaattggcaaatatacacgtcagaagtagttaaacatatgaatgatggacaaaaatcaatcaatagtggcgttcaagaacttatggataataaatatgttcacagaatacaaaaaagagctgaaaacggtgtgtttaaaggttttgaatacttagtttacgaaaaaccaaccgaaatgccattttcggaaaacggattatcggcaaacgggttttcggaaaacggaaaaacggaaaaccgaaaagggcgtactactaataataatagtactaataatgatttaactaataataacaatactaataatgaaggaagtatattgtcgggcaacccgacggtgtcttccattccctataaagaaattatcgaatacttaaataaaaaagcaggaaagcattttaaacataatacagctaaaacaaaagattttattaaagcaagatggaatcaagattttaggttggaggattttaaaaaggtgattgatatcaaaacagctgaatggttaaacacggatagcgataaataccttagaccagaaacactttttggcaataaatttgaggggtacctcaatcaaaaaatacaaccaactggcacggatcaattagaacgcatgaagtacgacgaaagttattgggactaggaggaagttatgaaaccattatttgacgaaaaaataaacaaaagtttaaaaaaatatcaaccaatcgaagtaatactaagacagaattgcgataaatgcgggcatcaatatgacttatataagtttgaaaatggatatgaatacaaagacggttgcgaatgtgaaattcaaagattggcttatgaagaatacaaaaggaataaacaaaagaaacttgattatattttcaatcaatcaaatgttaatccgtctctaagagatgcaacagttaacaactataagccacaaaatgaaaaacaagtacacgctaaacaaacagcaatagagtacgtacaaggcttctctacaaaagaaccaaaatcattaatattgcaaggttcatacggaactggtaaaagccacctagcatacgctatcgcaaaagcagttaaagctaaagggcatacagttgcttttatgcatataccaatgttgatggatcgtatcaaagcgacatacaacaaaaatgcagtagagactacagacgaactagtcaaattacttagtgagattgatttacttgtactagatgatatgggtgtagaaaacacagaacacactataaataaacttttcagcattgttgataacagagtaggtaaaaacaacatctttacaactaactttagtgataaagaactaaatcaaaatatgaactggcaacgtataaattcgagaatgaaaaaaagagcaagaaaagtaagagtaatcggagacgatttcagggagcgagatgcgtggtaatcacaaaacaaaatataaaagaaatattacattgtagagatgtatatgctcaaaagatgattgattttgcaaacggagaccaagagaaacttaaaaacttattgatgataagttgaaagaaaaagaagaaagacccgcaatcgtcgaatattaaggagtgttaaaaatgccgaaagaaaaatattacttataccgagaagatggcacggaagatatcaaagtcatcaagtataaagacaacgtaaatgaagtttattcgctcacaggagcccatttcagcgacgaaaagaaaattatgactgatagtgacctaaaacgattcaaaggcgctcacgggcttctatatgagcaagaactaggtttacaagcaacgatatttgatatttagaggtggcacatggaagtacattacagtagtaaaacaaacgagtggacaacaccacaacatttatttgatgacctaaacgaagaattcagttttacattagatccttgttcaacagacgagaacgccaaatgccggaagtattatacagtaaaagataatgggttaattcaagactggtctgaggacattgtttttatgaacccgccatacggtcgaagtattaagcgttgggtcaagaaggcttatgaagaaagtttgaaaggcgcaacggtagtttgtttaatacccgcaagaacagacacgacatattggcatgattacatttttaataaggctgatgatataagattcctacgcggtcgtctgaagtttggagatagtaaaaacagcgctccttttcctagcgcaattatcgtttatagaggtgcacaatgagtaaatacaacgctaagaaagttgagtacaaaggaattgtatttgatagcaaagttgagtgtgaatattaccaatatttagaaagtaatatgaatggcgctaactatgatcgtatcgaactacaaccgaaattcgaactacaacctaaatttgggaagcaaagaccgattacgtatatagccgatttctctttgtggaaggaagggaaactggttgaagttgtagacgttaaaggtaaggcgactgaagttgccaacatcaaagcgaagatattcagatatcagtatagagatgtgaatttaacgtggatatgtaaagcgcctaaatacacaggtcaagaatggatggtatatgaggacttagtgaaagtcagacgtaaaagaaaaagaaaaatgaagtgatttaatgcaacaacaagcatatataaatgcaacgattgatataagaatacctacagaagttgaatatcatcatttcgatgatgtggataaagaaaaagaagtgttggcagattacttatataacaatccagacgaaatactagagtatgacaatttaaaaattagaaatgtaaatgtagaggtggaataaatgggcagtgttgtaatcattaataataaaccatataaatttaacaattttgaaaaaagaaataatggcaaagcgtgggataaatgctggaattgtttctaaacgtgtaagaggttgttgggagttttcagaagctttagacgcgccttatggcatgcatctaaaagaatatagagaaatgaaacaaatggaaaagattaaacaagcgagactcgaacgtgaattggaaagagagcgaaagaaagaggctgagctacgtaagaagaagccacatttgtttaatgtacctcaaaaacattcacgtgatccgtactggttcgatgtcacttataaccaaatgttcaagaaatggagtgaagcataatgagcgtaatcagtaacagaaaagtagatatggacgaagcgcaagacaatgttaagcaaccagcgcactacacatacggcgacattgaaattatagattttatcgaacaggttacggcacagtacccaccacaattagcattcgcaataggtaatgcaattaaatacttgtctagagcaccgttaaagaatggtcatgaggatttagcaaaggcgaagttttacgtcgatagagtatttgacttgtgggagtgatgaccatgacagatagcggacgtaaagaatacttaaaacattttttcggctctaagagatatctgtatcaggataacgagcgagtggctcatatccatgtagtaaacggcacttattactttcatgggcatatcgtaccaggttggcaaggcgtgaaaaagacatttgatacagcggaagagctcgaaatatatataaagcaacatggtttggaatatgaggaacagaagcaactaactttattttaaggagatgtaaaaatgaaaatcaaagtaaaaaaagaaatgagactagatgaattaattaagtgggcgcgagaaaatccggatctatcacaaggaaaaatatttttttcaacaggatttagtgatggattcgttcgttttcatccaaatacaaataagtgttcgacgtcaagttttattccaattgatatccccttcatagttgatattgaaaaagaagtaacggaagagactaagtttgataggttgttagaggtatatgagattcaagaaggagtctataaatccttattacacaaaggtatcagtttgaacgaacgttttgaagacgacaatttttttcctactaaagcatactatatcttaaacgacgacctaactatgacgttaatctggaaagatggggagttgctagtatgatgttgaaatttaaagcttgggataaagataaaaaagttatgagtattattgacgaaatcgattttaatagtgggtacattttgatttcaacaggttataaaagtttcaatgaagtaaaactattacaatacacaggatttaaagatgtgcacggtgtggagatttatgaaggggatattgttcaagattgttattcgagagaagtaagttttatcgagtttaaagaaggagccttttatataacttttagcaatgtaactgaattactaagtgaaaatgacgatattattgaaattgttggaaatatttttgaaaatgagatgctattggaggttatgagatgacgttcaccttatcagatgaacaatataaaaatctttgtactaactctaacaagttattagataaacttcacaaagcattaaaagatcgtgaagagtacaagaagcaacgagatgagcttattggggatatagcgaagttacgagattgtaacaaagaactggagaagaaagcaagcgcatgggataggtattgcaagagcgttgaaaaagatttaataaacgaattcggtaacgatgatgaaagagttaaattcggaatggaattaaacaataaaatttttatggaggatgacacaaatggataaccgcgaacaaatcgaacaatcagttataagtgctagtgcgtataacggcaatgacacagagggattgttaaaagagattgaggacgtgtataagagagcacaagcgtttgatgaaatacttgagggaatgacaaatgctattcaacattcagttaaagaaggtattgaacttgatgaagcagtagggattatggcaggtcaagttgtctataaatatgaggaggagcaggaaaatgaataacacattacaagtaaaactattatcagaaaatgctagaatgcccgaacgaaatcataagacggatgcaggttatgacatattctcagctgaaactgtcctacttgagccacaagaaaaggcagtgattaaaacagatgtagctgtaagcattccagagggctatgtcgggctattaactagccgtagtggtgtaagcagtaaaacgcatttagtgattgaaacaggcaaaatagacgcgggatatcatggtaatttagggattaatatcaagaatgataatgaaacgttagagagtgaggatatgagtaaccttggtcggagtcctgctgagatagatggaaagtatgcccgactacctgtaacagataaatttttatgtatgaatggtagttatgtcataaacaaaggcgacaaactagctcaattggttattgtgcctatatggacacctgaactaaagcaagtggaggaattcgagagtgtttcagaacgtggagcaaaaaggcttcggaagtagcggagtgtaaagacatattagatcgagtcaaggaggttttggggaagtgagagaacgcactaaagttatatatcgtggttggaataaggagatatttattttacagggtaaaaatatgaatgttattggtttgcgccaaatatttgatgaactcaaaagatcgtatgaaggttataaaatcgttgttattccaatagaagttgattttgaaatcaaataaacaggagtgatgagaagtgacacaatacttagtcacaacattcaaagattcaacaggacgcaagcatacacacataattaaagctaagagcaatcaaaggtttacagttgttgaggcagagagtaaagaagaagcgaaaaagaagtacgagaaacaagttaagataaggagagatggagatgccaaagaaaacggtaacgattgatgtagatgaaaacttattagtagtagctagtaatgaaatatcagaactattatatgaatatgacagtgagttaatgtcagctgatgaagatggcgataatagagatatcgaagaaaaaagagacgcattaaaacaagctatacaaattatcgataaattaacatggggtgtttagtggtggttaaagaaattttgagactattattcttactagcgatgtatgagttaggtaagtatgtaactgagcaagtatatattatgatgacggctaatgatgatgtagaggcgccaagtgactttgaaaaaatcagagctgaagtttcatggtaatagatattatcatttttgaattaattatattaatgtgtttagcaatagcactggaggtgttgtaaatatgtggattgtcatttcaattgttttatctatatttttattgatcttgttaagtagcatttctcataagatgaaaaccatagaagcattggagtatatgaatgcttatcttttcaagcagttagtaaaaaataatggtgttgaaggtttagaagattatgaaaatgaagttgaacgaattagaaaaagattcaaaagctaaagagaggcgttggcttctctgctctatctaaaataatgaaaggagccgaacatgttagacaaagtcactcaaatagaaacaattaaatatgatcgtgatgtctcatattcttatgctgctagtcgtttatctacacattggactaatcacaatatggcttggtctgactttatgcagaagctagcacaaacagttagaactaaagaagatttaactgagtacaataaaatgtctaagtctgaacaagccgatataaaagatgttggcggatttgtcggtggatatttaaaagaaggcaaacggcgtgctggtcaagtcatgaatcgttcaatgctaacacttgatatcgattatgctgctcaagatatgactgacatattatctatgttttatgattttgcatattgtttatattcaacacataagcatagagagataagtccaagactgcgtttagtgattcctttaaaacgaaatgtaaatgcagatgagtatgaagctattgggcgtaaagtcgcagatatcgttggcatggattacttcgatgatacaacttatcaaccacataggctaatgtattggccttcaactagtaacgatgcggaatttttctttacgtatgaagatttacctttgttagatccagatacaatattaaatgaatatgttgattggactgacacattagaatggccaacgtcttcaagggaagagagtaagactaaaagattagcagataagcaaggtgacccagaagaaaagccgggaattgttggcgcattttgtagagcttatacgatagaagaagctatagaaacttttattcctgacttatacgaaaaacattctactaaccgttatacctatcatgaaggttcaactgcaggtggattggtgttatacgaaaataacaagtttgcctattctcatcataatacggatcccgtaagcggtatgcttgtgaacagttttgatttagtacgcatacacttatatggtgctcaagatgaagacgctaaaacagatactccggttaatcgactacctagttataaagcaatgcagcaaagagcgcaaaatgatgaggttgttaaaaagcaattaattaacgacaaaatgactgatgcaatggaggatttcgatgaaatagaaaatagcgatgatgcatggtctgagacgttagaaattacttcgaaaggtactttcaaagctagtatcccaaatatagaaattatattgcgtaatgatccaaatttaaaaggaaaaatagcctttaacgaatttacgaaacaaattgaatgtttagggaaagtgccatggaatactaattttaagacacgtcaatggcaagacggtgatgatagcagtttaagaagttatatcgaaaagatttatgacatacaccattcaggtaaaacaaaagatgccattataagcgtagcaatgcaaaatgcttatcatccagtaagggattatctaaataaaatatcgtgggatggacataaacgtcttgaaaagttatttatcaaatacttaggtgttgaagacactgaagtgaatagaacaactaccaaaaaagcattgactgctggaatcgctagagtaatggagcctggatgtaaatttgactatatgcttacactttatggtcctcaaggtgtaggtaaatctgctttgctaaaaaaattaggtggtgcatggttttctgacagtttagtttctgttacaggtaaagaagcttatgaggccttacaaggcgtttggctaatggaaatggcagaacttgcagctacaagaaaagctgaagttgaagctattaagcatttcatatctaaacaagttgaccgatttcgtgttgcttatgggcattatattgaagattttccaaggcaatgtattttcattggtacaactaataaagttgatttcttaagagatgaaactggtggaagacgtttttggccaatgactgtaaatccagagagagttgaagtgaactggtctaaactaaccaaagatgagattgaccaaatttgggcagaagctaaacactattatgaacaaggagaatatttattccttaaccctgaactagaagaagaaatgcgttcaatacaaagcaaacatactgaggaatctccatatacaggcattattgatgaatatcttaacacaccaattcctagcaattgggatgacttaactatctttgaacgaagacgattttatcaaggtgatgttgatatgttaccaacaggaaatgtagattacgttaaaagaaataaagtctgtgcgcttgaagtgtttgttgaatgttttggtaaagataagggagatagtagaggatctatggaaattagaaagatttcaaacatcttaagacaattagacaattggtctgtatatgatggtaataaaagtgggaaaattcgatttggaaaagattatggtgtacagatagcttatgtaagagatgaaagtttagaggatttaatataagaaatattgaataaatatgtattttagagtgttgtatcagatgttgcatcattttttgagtgatgcaacacgggagtgtaaaaagtaatcgtaggtgttgtatcatttttggtgatgcaacattgatgcaacaaatgatacaacacctctttcctttctagctgtagggttcaaccctgtttgtttccaatgttgcatcaaattcactataaagtttaaaaagtagtgttagggagtaaagaggtataggggtaaccttctaacagctatttttaaaagtttggcaagaattgatgcaacatcggaacacaaatataaattttgtatacaaggtgaatatatgaaagaatcgacattagaaaaatatttagtgaaagagataacaaagctaaacggtttatgtttaaaatgggttgcacctggaacaagaggtgtgccagatagaattattattatgccagaaggaaaaacatattttgtagaaatgaagcaagaaaaaggaaagttgcatcctttacaaaaatatgtgcatagacaatttgaaaatagagatcataaagtatatgtgttatggaataaagaacaagtaaatacttttatcagaatggtaggtggaacatttggcgattgacttcaaaccacatagctatcaaaagtatgcaatagataaagtgatagataatgagaaatacggtctgtttttagatatgggtctagggaaaacagtatcaacacttacagcatttagtgaattgcagttgttagacactaaaaaaatgttagttatagcacctaaacaagttgctaaagatacatgggttgatgaagttgataagtggaaccatttaaatcatctgaaagtgtctttagttttaggaacacctaaagaaagaaatgatgcattaaacacagaggctgatatctatgtaaccaataaagaaaatactaaatggttatgtgatcaatataaaaaagaatggccatttgacatggtggtgattgatgaactgtctacatttaaaagtcctaagagtcaaaggttcaaatctataaaaaagaaattaccactcattaatagatttataggattaacaggaacacctagcccaaatagtttacaggatttatgggctcaagtttatttgatagacagaggtgaaagacttgagtcttcattcagtcgttatcgagaaaggtactttaaaccaacacatcaagttagcgaacacatttttaactgggagctaagagatggatctgaagaaaagatatatgaacaaatagaagatatatgtttaagcatgaaagcgaaagattatctggatatgcctgacagagttgatactaaacaaacagtagtcttatcagaaaaagaaagaaaagtatatgaagaattagaaaaaaactatattttagaatcggaagaagaagtaacagttgtagctcaaaatggggcatcattaagtcagaaactacttcaactatctaacggcgcagtttatacagatgaggaagatgtaagacttatacatgataagaagttagataagttagaggaaattatagaggagtctcaaggccaaccaatactattgttttataacttcaaacacgataaagaaagaatacttcaaaggtttaaggaagcaaccacattagaggattcaaactataaagaacgttggaacagtggagacattaagttgcttatagcacatccagcaagtgcaggacatggattaaacttacaacaaggtgggcacattattgtttggtttggacttacatggtccttggaattataccaacaagcaaatgctagattatacagacaaggacaaaatcatacgactattattcatcatatcatgaccgataacacaatagatcaaagagtatataaagctttacaaaataaagaactaacgcaagaagaattgatgaaagctattaaagcaagaatagctaagcataagtaatggaggtataagatgggaaaggcatcatacgatattaagccaggtacatttaaatatattgagtcagagatatataacctacaagagaacaagaaagagataaatagattgagaatggagatacttaacccaacgaaagagctagacactaacattgtgtatggaccgttgcaaaaaggtgaaccagttagaacaactgaactaatggcaacaagattattgactaataagatgttacgaaacctagaagaaatggtcgaagcagttgaaagtgaatacttaaagttacctgaagatcataagaaagtaataaggttaaagtattggaatagagataagaagctaaagatagagcaaataggagatgcatgtcacatgcatcgtaatacagttactacagtacgaaagaactttgttaaagcggtagcgtatcatgcaggtatcaaataacattgtgcaaagattgtgcaaaaggcctacaaatctgtgctaatatgtcagtgtgggacaaaaagatgtataggctccttacgataatagacgaaacatgtatatgaggcacatcactttgtggtgtgtcttttgttgtacgattagtgaggtgtgagtaatgacgaaacaaaacaacacctataagcatggacgtaagtcttaccgatatgattggttctatcattctaaagcatggaaaaagctaagagaaatagcactagatagggataacaacctatgccaaatgtgcttgcgtgaagggaaaattacagatgcaaacatagtgcatcacattgtgtatgtaacagaagacttcagtaaagctttagatttagaaaatttgatgtcagtttgctatacctgtcataaccaaattcatgcaaatgataaaaacaaagataaatataaaaataaaaagtttcgagttgaaaagatttaaataaaagaattataaaataatttttaatcccccctacctggtggggaattccattttacaccgggaaccggtgaaggcaggaacgagagcagcgcggataatttttcatgaaagggggttttcttatgaaattaacaaaaaaacagctgaaagaatatattgaagactacaaaaaatctgacgatatgttaattaatttatatttagaaacatatgaattttattgtcgattacgggatgaattgaaaaacagtgatttgatgatggagcataccaataaagctggagcaagtaatattgttaagaatccattaactattgaactgacaaaaacagttcaaacactaaataacttactcaagtctatgggtttaactgcagcacaaaggaaaaagatagtgcaagaagaaggtggattcggtgactattaaagttttaaatgaaccttcaccaaaactattaacaacatggtatgcagaacaagttattcaagggaaaataaaaacaagtaaatatgtaaaaaaagaatgtgaaagacacattaggtatttggaaaatggcggtaaatggatgtttgatgaagaattagcacatcgacctattcgatttatagagaaattttgtaaaccttccaaaggatctaaacgtcaacttgtattacagccttggcaacattttattattggtagtttatttggctgggttcataaagaaacaaagctgcgcaggtttaaagaagctttaatatttatgggtcgaaaaaatggtaaaacaacaaccatttctggtgtcgctaactatgctgtgtcacaagatggagaaaatggtgcagaaattcatttgttagctaatgtgatgaaacaagcgaggattctatttgatgaatctaaggctatgataaaagctagcccaaaacttagagagaatttcaggcctttaagagatgaaattcattacgatgcaacgatatctaaaattatgccacaggcttcagacagtgataagttggatggtttaaatacacatatgggcattttcgatgaaatccatgaatttaaagactataaattgatttcagttataaaaaactcaagagcggcaaggttacaacctcttcttatctacattacgacagcgggttaccaattagatggtccactcgttgatatggtagaagcgggaagagacacattagatcaaatcatcgaagatgaaagaactttttactatttagcatctttagatgatgacgatgatataaatgattcgtcgaattggattaaagcaaatcctaacctgggcgtttctatcgatttagatgaaatgaaagaagagtgggaaaaagctaaacgtacaccagctgaacgaggagattttataacaaaaagatttaatatatttgctaataacgacgaaatgagcttcattgattatccaacgcttcaaaaaaataatgacattatttccttagatgagctggaaggaagaccttgtacgattggttacgatttatcagaaacagaagattttacagccgcatgtgcaacatttgcattagataatggtaaagttgctgtcttaacacattcttggattcctaagcataaggtagagtactcaaatgaaaaaataccatatagagaatgggaagaagatggcttactaactattcaagataagccgtatattgattatcaggatgtctttaattggataataaagatgaatgagcattatgttgtagaaaaaattacttatgatagagccaatgctttcaaactaaatcaagagttaaaaaattatggatttgaaacagaagaaacaagacaaggagctttgactttaagtccagcactgaaagatctaaaagagatgtttttagacggcaaaataatatttaataacaatcctttaatgaaatggtatatcaataatgttcagttaaaactggacagaaatggaaactggttgccatctaaacaaagcagatatcgtaaaatagatggttttgcagcatttttaaacacatatacagatattatgaataaagttgtttctgatagcggtgaaggaaacatagagtttattagtattaaagacataatgcgttaaggaggtgaatgttatcgcaaaagagaatattgtcacacgcataaagaaaaaattgatagacaattggattgatcagtcagcttctaagctttatgactttagcccatggaaaaataaatctttttggggtgtaattaataatacgcttgaaactaatgaaacgatattttcagctattacaaagttatctaattccatggcgagtttgcccttgaaaatgtatgaagattataaggtggttaatactgatgtatctgatttacttacagtgtcaccgaataattctctgagtagttttgattttattaatcaaattgaaacaattagaaatgaaaaaggtaatgcatatgtgctaattgaacgagacatctatcatcaaccatcaaagcttttcttattaaatccagatgttgttgagatgctgattgaaaacaaatcacgtgagctttattattcaattcatgctgcaacgggaaataaattaattgttcataatatggacatgctacatttcaaacacattgttgcatctaatatggttcaaggcattagtccgattgatgtgttaaaaaatacaactgaatttgataatgcagtaagaagctttaacctgacagaaatgcaaaagccagattcattcatgcttaaatacggttccaatgtaagtacagaaaaaaggcaacaagtattagaagattttaaacaatactacaaagaaaatggtggaatattattccaagagccgggtgttgaaatcgaaccgctacctaaaaaatatgtctctgaagatatagtagcaagtgaaaatttaacaagagaaagagtagctaacgtttttcaattgccctcagtatttttaaacgcaaaatcaaacacaaattttgcgaaaaatgaagagttaaacagattttacttacagcataccttattgccaatcgtcaaacagtatgaagaagaatttaatcgaaaactacttactaaaacagatagagaaaaaaataggtattttaaatttaacgttaaatcttatttaagggctgatagtgcaacacaagcagaagtgtactttaaagcagttcgtagtggctattacactataaatgacattagagagtgggaggatttaccaccagttgaaggtggagacaagccactaataagcggagacctgtatccgattgacacgccacttgaattaagaaaatctttgaaaggtggtgataaaaatgtcaaagaaagctaagtattttcaaatgaaaagaaaatcaaaaagtaaaggcgaaatatttatttatggtgatattgtaagtgataaatggtttgaaaatgatgtgactgctacagatttcaaaaataaactagatgatctaggagacatcagtgaaatagatgttcatataaattcatctggaggcagtgtatttgaagggcatgcaatatacaatatgctaaaaatgcatcctgcaaaaattaatatctatgtcgatgccttagcggcatcaattgcaagtgttatcgctatgagtggtgacgctatttttatgcacaaaaatagttttttaatgattcataattcatgggttatgactgtaggtaatgcagaagaattaagaaagacagcggatttacttgaaaaaacagatgctgttagtaattcagcttatttagataaagcaaaagatttagatcaagaacacttaaaacagatgttagatgcagaaacttggcttactgcagaagaagccttgtctttcggcttgatagatgaaattttaggagctaatgaaatagctgctagtatctctaaagagcaatataagcgtttcgagaacgtcccagaagatttaaagaaagatgtagacaaaatcactaaaattgatgatgtagatacatctgaattggttgaaacacctaaagaaagtatgtcactagaagaaaaagaaaaaagagaaaaaattaaacgcgaatgcgaaattttaaaaatgacaatgaattattaggaggaaatgaaatgccgacattatatgaattaaaacaatccttaggtatgattggacaacaattaaaaaataaaaatgatgaattgagtcagaaagcaacagatccaaatattgatatggaagacatcaaacaactagaaacagaaaaagcaggtttacaacaaagatttaacattgttgaaagacaagtgcaagacattgaagagaaagaaaaagcgaaagttaaagataaaggagaagcttatcaatctttaagtgataatgagaagatggttaaagctaaggcagagttttatcgtcacgcgattttaccaaatgaatttgaaaaaccttcaatggaggcacaacgtttattacacgctttaccaacaggaaatgattcaggtggagataagctcttaccaaaaacactttctaaagaaattgtttcagaaccatttgctaaaaaccaattacgtgaaaaagctcgtctaactaacattaaaggtttagagattccaagagtttcatacactttagacgatgatgatttcattacagacgtagaaacagcaaaagaattaaaagcaaaaggtgatacagtcaagttcactactaataaattcaaagtatttgctgcaatttcagatactgtaattcatggatcagatgtagatttagtaaactgggttgaaaacgcactacaatcaggattagcagctaaagagcgtaaagatgccttagcagtaagtcctaaatctggattagaacacatgtcattttataatggatctgttaaagaagttgagggagcagacatgtatgatgctattattaacgctttagcagatttacatgaagattatcgtgataacgcaacaatttatatgcgatatgcagattatgtcaaaattattagtgttctttcaaatggaacaacaaatttctttgacacaccagcagaaaaagtatttggcaaaccagtagtatttacagatgcagcagttaaacctattgtgggagatttcaattattttggaattaactatgatggaacaacttatgacactgataaagatgttaaaaaaggcgaatatttgtttgtattaactgcatggtatgatcagcaacgtacattagacagtgcattcagaattgcaaaagcaaaagaaaatacaggttcattacccagctaagccccaaaaggttaatgtaacagctaaggctaaatcagctgtaatatcagccgaataggggtgatgaaatgagtttagaagaaattaaattgtggttgagaattgactataatttcgaaaatgatttaattgaaggtctcattcaatcggctaagtctgaattactattaagtggggttccagattatgacaaagatgacttggaatacccgcttttttgtacagcgattagatatatcattgcaagagattatgaaagtcgtgggtactcaaatgaccaatctagaagcaaggtttttaatgaaaagggattgcaaaaaatgattctgaaattaaaaaagtggtaggtgatttttaaatggaatttaatgaatttaaagatcgcgcatatttttttcaatatgtaaataaagggccgtatccagatgaagaggaaaaaatgaaattgtatagttgcttttgtaaaatatataatccttctatgaaagatagagaaattttaaaagcgactgaatcaaagtcaggactaaccataattatgaggtcttctaaaattgaatatctaccacaaacaaatcacttagttaaaattgacagaggcttatattccgataaattattcaacattaaagaaataagaattgatacaccagatattggctataatacagtggttttatcagaaaaatgagtgtagaaattaaagggatacctgaagtgttgaagaaattagaatcggtatacggtaaacaatcaatgcaagctaagagtgatagagctttaaatgaagcatctgaattttttataaaggctttaaagaaagaattcgagagttttaaagatacgggtgctagcatagaagaaatgactaaatctaagccttatacaaaagtaggaagtcaagaaagagctgttttaattgaatgggtaggccctatgaatcgcaaaaacattattcacttgaatgaacatggttatacaagagatggaaaaaaatatacaccaagaggttttggagttattgcaaaaacattagctgctaatgaacggaagtatagagaaattataaaaaaggagttggccagataaatgaatatattaaacaccataaaagaaattttattatctgatgcagagctccaaacatatataaattctagaatatactattataaagtcactgaaaatgctgaaacttccaaaccttttgttgttattacacctatttatgatttaccttcagacttcatgtctgataaatatcttagtgaagaatacttaattcaaatagatgtagaatcttcaaataatcagaaaacaattgatataacaaaacgaataagatatctgttatatcaacaaaatttaattcaagcatctagtcagttagatgcttattttgaagaaactaaacgttatgtgatgtcgagacgttatcaaggcataccaaaaaatatatattataaaaatcagcgcatcgaataggtgtgctttttaatttttaaggaggaaataagcaatggcagaaggacaaggttcttataaagtaggttttaaaagattatacgttggagtttttaacccagaagcaacaaaagtagttaaacgcatgacatgggaagatgaaaaaggtggtacagttgatctaaatatcacaggtttagcaccagatttagtagatatgtttgcatctaacaaacgtgtttggatgaaaaaacaaggtactaatgaagttaagtctgacatgagtatttttaatattccaagtgaagatctaaatacagttattggtcgttctaaagataaaaatggtacatcttgggtaggagagaatacaagagcaccatacgtaacagttattggagaatctgaagatggtttaacaggtcaaccagtgtacgttgcgctacttaaaggtacttttagcttggattcaattgaatttaaaacacgaggagaaaaagcagaagcaccagagccaacaaaattaactggtgactggatgaacagaaaagttgatgttgatggtactccacaaggtattgtatacgggtatcatgaaggtaaagaaggagaagcagaattcttcaaaaaagtattcgttggatacacggacagtgaagatcattcagaggattctgcaagttcgttacccagctaacccccaaaatgttgaagtagcagttaattcaaaatctgcaacagtttcagcagaataggggctttcaaaataaatcaaaggagaataatttatgactaaaactttaaaggtttataaaggagacgacgtcgtagcttctgaacaaggtgaaggcaaagtgtcagtaactttatctaatttagaagcggatacaacttatccaaaaggtacttaccaagtggcatgggaagaaaatggtagagaatctagtaaagttgatgtacctcaattcaaaaccaatccaattctagtttcaggcgtatcatttacaccagaaactaaatcaattatggtaaataccgatgacaatgttgagccaaacattgcaccaagcacagcaacgaataaaatattgaaatatacaagtgaacatccagaatttgttactgtagatgaaaatacaggagcaattcacggtgtagctgaaggtacttcagtaatcactgctatgtctactgatggaagcgataagtcaggacaaatttcagtgacagtaacaaacggatagggatttaaggcgcagtatatctgcgtcttttttatttgaataaaaggagctaatacaatgattaaatttgaaattaaagatcgtaaaacaggaaaaacagagagctatacaaaagaagatgtaacaatgggcgaagcagaaaaatgctatgagtatttagaattagtaaatcaagagaataaaaaagaagcacctaacgcaacaaaaatgagacaaaaagagcgacagttattagtagatttatttaaagatgaaggattgactgaagaagatgttctgaacaagatgagtactaaaacttatacaaaagccttacaagatatatttcgagaaatcaatggtgaagatgaagaagattcagaaactgaaccagaagagatgggaaagacagaagaataatctcaataaaagacattttatcgaacattaagaaaatacaacgtttctgtatggagcagtatgggtggacattaactgaagtcagaaaacagccgtatgtaaaacttttagaaatacttaatgaagagaataaagaagagactgaagaaaaacaaagtgaacaaaaagtcattacaggtacggatttaagaaaactttttggaagctagaaaggaggttaatatgaatgaaaaagtagaaggcatgaccttggagctgaaattagaccatttaggtgtccaagaaggcatgaaaggtttaaagcgacaattaggtgttgttaatagtgaaatgaaagctaatctgtcagcatttgataagtctgaaaaatcaatggaaaaatatcaggcgagaattaaggggttaaatgataggcttaaagttcaaaaaaagatgtattctcaagtagaagatgagcttaaacaagttaacgctaattaccaaaaagctaaatccagtgtaaaagatgttgagaaagcatatttaaagttagtagaagccaataaaaaagaaaaattagctcttgataaatctaaagaagccttaaaatcatcgaatacagaacttaaaaaagctgaaaatcaatataaacgtacaaatcaacgtaaacaagatgcgtatcaaaaacttaaacagttgagagatgcagaacaaaagcttaagaatagtaaccaagctactactgcacaactaaaaagagcaagtgacgcagtacagaagcagtccgctaagcataaagcacttgttgaacaatataaacaagaaggcaatcaagttcaaaaactaaaagtgcaaaatgacaatctttcaaaatcaaatgataaaattgaaagttcttacgctaaaactaatactaaattaaagcaaacagaaaaagaatttaatgatttaaacaatactattaagaatcatagcgctaatgtcgcaaaagctgaaacagctgttaataaagaaaaagctgctttaaataatttggagcgttcaatagataaagcttcatccgaaatgaagacttttaacaaagaacaaatgatagctcaaagtcatttcggtaaacttgcaagtcaagcggatgtcatgtcaaagaaatttagttctattggagacaaaatgacttccctgggacgtacaatgacgatgggcgtatctacaccgattactttaggtttaggtgcagcattaaaaacgagtgcagactttgaagggcaaatgtctcgagttggagcgattgcacaagcaagcagtaaagacttaaaaagcatgtctaatcaagcggttgacttaggagctaaaacaagtaaaagtgctaacgaagttgctaaaggtatggaagaattggcagctttaggctttaatgccaaacaaacaatggaggctatgccaggtgttatcagcgcagcagaagcaagtggtgcagaaatggctacaactgcaactgtaatggcttcagcgattaactctttcggtttaaaagcatctgatgcaaatcatgttgctgatttacttgcgagatcagcaaatgatagtgctgcagatattcaatatatgggagatgcattaaaatatgcaggtactccagcaaaagcattaggagtttcaatagaggacacttctgcagcaattgaagttttatctaactcaggtttagaggggtctcaagcaggtactgcattaagagcttcgtttattaggctagctaatccaagtaaaagtacagctaaggaaatgaaaaaattaggtattcatttgtctgatgctaaaggtgagtttgttggaatgggcgaattgattagacagttccaagataacatgaaaggcatgacgagagaacaaaaattagcaacagtggctacaatagttggcactgaagcagcaagtggatttttagccttgattgaagcgggtccagataaaattaatagctatagcaaatcattgaagaactctaatggtgaaagtaaaaaagcagctgatttgatgaaagataacctcaaaggtgctctggaacaattaggtggcgcttttgaatcgttagcaattgaagttggtaaagatttaacgcctatgattagagcaggtgcggaaggattaacaaaattagttgatggatttacacatcttcctggttgggttagaaaggcttcggtaggcttagcaatttttggtgcatctattggtcctgctgttcttgctggtggcttattaatacgtgcagttgggagcgcggctaaaggctatgcatcattaaatagacgcattgctgaaaatacaattctttctaataccaattcaaaagcaatgaaatctttaggtcttcaaacattatttcttggttctacaacaggaaaaacgtcaaaaggctttaaaggattagccggagctatgttgtttaatttaaaacctataaatgttttgaaaaattctgcaaagctagcaattttaccgttcaaacttttgaaaaacggtttaggattagccgcaaaatccttatttgcagtaagtggaggcgcaagatttgctggtgtagccttaaagtttttaacaggacctataggtgctacaataactgctattacaattgcatataaagtttttaaaaccgcatatgatcgtgtggaatggttcagaaacggtattaacggtttaggagaaactataaagttttttggtggcaaaattattggcggtgctgttaggaagctaggagagtttaaaaattatcttggaagtataggcaaaagcttcaaagaaaagttttcaaaggatatgaaagatggttataaatcattaagcgacgatgaccttctcaaagtaggagtcaacaagtttaaaggatttatgcaaaccatgggcacagcttctaaaaaagcgtctgatactgtaaaagtgttagggaaaggtgtttcaaaagaaacagaaaaagctttagaaaaatatgtgcattattctgaagaaaatagcagaatcatggaaaaagtacgtttaaactcgggtcagatatcagaagacaaagcaaaaaaacttttgaaaattgaaacggatttatctaataaccttatagctgaaatagaaaaaagaaataaaaaggaactcgaaaaaactcaagaacttattgataagtatagtgcattcgatgaacaagaaaagcaaaacattttaactcgaactaaagaaaaaaatgacttgcgaattaaaaaagagcaagaactcaatcagaaaatcaaagaattgaaagaaaaagctttgagtgatggtcagatttcagaaaatgaaagaaaagaaattgaaaagcttgaaaatcaaagacgtgatatcactgttaaagaattgagtaagactgaaaaagagcaagagcgtattttagtaagaatgcaaagaaacagaaatgcttattcaatagacgaagcgagcaaagcaattaaagaagcagaaaaagcaagaaaagcaagaaaaaaagaagtggacaagcaatatgaagatgatgtcattgctataaaaaataacgtcaacctttctaagtctgaaaaagataaattgttagctattgctgatcaaagacataaagatgaagtaagaaaagcaaaatctaaaaaagatgctgtagtagatgttgttaaaaagcaaaataaagatattgataaagaaatggatttatccagtggacgtgtatataaaaatactgaaaagtggtggaatggccttaaaagttggtggtctaactttagagaagaccaaaagaaaaaaagcgataaatacgctaaagaacaagaagaaacagctcgtagaaacagagaaaatataaagaaatggtttggaaatgcttgggacggcgtaaaaagtaaaactggcgaagcctttagtaaaatgggcagaaatgctaatcattttggcggcgaaatgaaaaaaatgtggagcggaatcaaagggattccaagcaaattaagttcaggttggagctcagccaaaagttctgtaggataccacactaaggctatagctaatagtactggtaaatggtttggaaaagcttggcaatctgttaaatcgacaacaggaagtatttacaatcaaactaagcaaaagtattcagatgcttcagataaagcttgggcgcattcaaaatctatttggagaggcacatcaaaatggtttagcaatgcatataaaagtgcaaagggctggctaacggatatggctaataaatctcgcgcgaaatgggataatatttctagtacagcttggtcgaatgcaaaatccgtttggaaaggaacatcgaaatggtttagtaactcatacaaatctttaaaaggttggactggggatatgtattcaagagcccacgatcgttttgatgcaatttcaagttcggcatggtctaacgctaaatcagtatttaatggttttagaaaatggctatcaaaaacatatgattggattagagatattggtaaagacatgggaagagctgcggctgatttaggtaaaaatgttgctaataaagctattggcggtttgaatagcatgattggcggtattaataaaatatctaaagccattactgataaaaatctcatcaagccaatacctacattgtctactggtactttagcaggaaagggtgtagctaccgataattcgggagcattaacgcaaccgacatttgctgtattaaatgatagaggttctggaaacgccccaggcggtggagttcaagaagtaattcacagggctgacggaacattccatgcaccccaaggacgagatgtggttgttccactaggagttggagatagtgtaataaatgccaatgacactctgaagttacagcggatgggtgttttgccaaaattccatggtggtacgaaaaagaaaaaatggatggaacaagttactgaaaatcttggtaaaaaagcaggggacttcggttctaaagctaaaaacacagctcataatatcaaaaaaggtgcagaagaaatggttgaagccgcaggcgataaaatcaaagatggtgcatcttggttaggcgataaaatcggcgatgtgtgggattatgtacaacatccagggaaactagtaaataaagtaatgtcaggtttaaatattaattttggaggcggagctaacgctacagtaaaaattgctaaaggcgcgtactcattgctcaaaaagaaattagtagacaaagtaaaatcgtggtttgaagattttggtggtggaggcgatggaagctatctatttgaccatccaatttggcaaaggtttgggagctacacaggtggacttaactttaatggcggtcgtcactatggtatcgactttcaaatgcctactggaacgaacatttatgctgttaaaggcggtatagctgataaagtatggactgattacggtggcggtaattctatacaaattaagaccggtgctaacgaatggaactggtatatgcatttatctaagcaattagcaagacaaggccaacgtattaaagctggtcaactgatagggaaatcaggtgctacaggtaatttcgttagaggagcacacttacatttccaattgatgcaagggtcgcatccagggaatgatacagctaaagatccagaaaaatggttgaagtcacttaaaggtagtggcgttcgaagtggttcaggtgttaataaggctgcatctgcttgggcaggcgatatacgtcgtgcagcaaaacgaatgggtgttaatgttacttcgggtgatgtaggaaatatcattagcttgattcaacacgaatcaggaggaaatgcaggtataactcaatctagttcgcttagagacatcaacgttttacagggcaatccagcaaaaggattgcttcaatatatcccacaaacatttagacattatgctgttagaggtcacaacaatatatatagtggttacgatcagttattagcgttctttaacaacagatattggcgctcacagtttaacccaagaggtggttggtctccaagtggtccaagaagatatgcgaatggtggtttgattacaaagcatcaacttgctgaagtgggtgaaggagataaacaggagatggttatccctttaactagacgtaaacgagcaattcaattaactgaacaggttatgcgcatcatcggtatggatggcaagccaaataacatcactgtaaataatgatacttctacagttgaaaaattgttgaaacaaattgttatgttaagtgataaaggaaataaattaacagatgcattgattcaaactgtttcttctcaggataataacttaggttctaatgatgcaattagaggtttagaaaaaatattgtcaaaacaaagtgggcatagagcaaatgcaaataattatatgggaggtttgactaattaatgcaatcttttgtaaaaatcatagatggttacaaggaagaagtaataacagattttaatcagcttatatttttagatgcaagggctgaaagtccaaacaccaatgataacagtgtaactattaacggagtagatggtattttaccgggcgcaattagttttgcgcctttttcattagtattaaggtttggctatgatggtatagatgttatagatttaaatttatttgagcattggtttagatctgtgtttaatcgcagacatccttattatgttattacttctcaaatgcctggtgttaaatatgcagtgaatacagctaatgttacatctaatttaaaagatggttcttcaactgaaattgaagtaagtttaaatgtttataaagggtattctgaatcagttaattggaccgatagcgagttcttattcgactctaattggatgtttgaaaatggaattcctcttgatttcacacctaaatatactcatacatcaaatcaatttactatttggaacggttctactgatacgataaatccacgattcaagcacgatttgaaaatattaattaatttaaatgggagtggaggatttgaactggttaactatacaacaggtgatatttttaagtacaacaaaagtatagataaaaacactgattttgttttagatggtgtgtatgcatatcgagatataaatagagtgggaattgatacaaatagaggcattataacattagcgccaggtaaaaatgaatttaagattaaaggagacgtcagtgatattaaaactacatttaagtttccttttatttataggtaggtgatttaatggattatcatgatcatttatcagtaatggattttaatgaattgatttgtgaaaatttactagatgtagattacggttcttttaaagaatattatgaactgaatgaagctaggtacatcacctttacagtttatagaactactcataatagttttgtttttgatttattgatttgtgaaaacttcataatttatcatggtgaaaaatacacaattaagcagacagcgccaaaggttgaaggtgataaagtttttattgaagttacggcatatcacataatgtatgaatttcaaaatcactcagtggaatcaaataagcttgatgacgacagtagcgaaactggtaaaacgccagaatactctttagatgagtacttaagatatggatttgcaaatcaaaaaacgtcagtcaagatgacctataaaataattggagattttaaaagaaaaataccaattgatgaattaggtaataaaaatggcttagaatattgtaaagaagcagtagatttgtttggttgtattatttatccaaatgatacggagatatgtttttattctcctgaaacattttatcaaagaagcgagaaagtgattcgatatcaatataatactgatactgtatctgcaactgtcagtacattggaattaagaacagctataaaagtttttggaaaaaagtatacagctgaggaaaagaaaaattataatcctattagaacaactgacattaaatattcaaatggttttataaaagaaggtacttatcgtaccgcaacaattgggtctaaagctactattaactttgattgcaagtatggtaatgaaacagttagatttacaataaaaaagggctctcaaggtggaatatataagttgattttagacggcaagcaaattaagcaaatttcttgttttgctaagtcggttcagtctgaaacaatagatttaataaaaaatattgataaaggcaagcacgttttagaaatgatatttttaggagaagaccccaaaaatagaattgatatatcttcaaataaaaaagctaagccttgtatgtatgttggaactgaaaaatcaacagtcttaaatttaattgctgacaactcaggtcgcaatcaatacaaagcaattgttgactacgtcgcagatagtgcaaagcagtttgggattcgatatgctaatacgcaaacaaatgaagatatcgaaacacaggataagctgttagaatttgcaaaaaagcaaataaatgatactcctaagactgaattagatgttaattatataggttatgaaaaaatagagccaagagatagcgtattctttgttcatgaattaatgggatataacactgaattaaaggttgttaaacttgataggtcacatccatttgtaaacgcaatagatgaagtgtctttcagcaatgaaataaaagatatggtacaaattcaacaagcgcttaacagacgagttattgcacaagataatagatataactatcaagcaaatcgtataaatcatttatacactagtactttgaattctcctttcgagacaatggatatagggagtgtattaatataatggcaacagaagaagttaaaatcaaagcgctacttgaaaacgataaacagtactttccagctacacattggaaagctataaatgggataccttatgcaggcagtagtgatattgatggattgcctcaagacggtatcatttcggtagatgataaaaataaattagataatttaaaaataggcgaagcaggaattattcaaaatagcattgtacagaaatccccaaacggtaaattgtggaaaataacagttgacgatagtgggaaacttggtacagtgctattttattagaaaggaaggtgcattatggaaaatttgtatttaataaaggatttgggagctttagcaggtcgagattatagagctaaggaaatacaaaacttacaaagaatagagcaatttgcgcttggcttgacaacagagtttaagttgcatcagaaagctaaaacaattcaacacttcgctgagcaaatttattataatggtagatcgcaagcagcagtaaacaaatctttacaaagtcaaattaacgcacttgttgtggcaccacgtaataacagtgctaatgagattgttcaagctcgagttaatgtaaacggcgaaacctttgacacattaaaagaacatttagacgattgggaaaccaaaactcaaattaataaagaggaaactataagagaattaaataagaccaaacaagaaattcttgatatcgagtatcgttttgaacctgataagcaagaatttttatttgtgacagaacttgcacctcttacaaatgcagtaatgcaatccttctggtttgataatagaacaggcatagtatacatgacacaagctagaaataatggctatatgctaagtcgtttaagacctaatggtcaatttatagacagctcattgattgtaggtgggggtcatggtacacataacggttatagatatattgatgatgagttatggatttatagttttatcttaaatggtaataatgagaatacattagttcgtttcaagtatacgcctaatgtggaaattagctatggcaagtatggtatgcaagatgtatttacaggacacccagaaaaaccctacatcacccctgtcataaatgaaaaagaaaataaaattctatacagaattgagagacctagaagtcagtgggaacttgaaaactcaatgaattatatagagataagaagtttagacgatgttgataaaaatattgataaagttttgcataaaatcagtatccctatgagactaacaaacgaaacccaaccaatgcagggtgtgacttttgatgaaaaatacttgtattggtatacaggagacagtaatccaaataatagaaactatttaacggctttcgatttagaaacaggagaagaagcgtatcaggttaatgctgactatggtggaacactagattcatttcctggcgaattcgcggaagcagaaggtttgcaaatatactatgacaaagatagtggtaaaaaagctttgatgctaggtgttactgtcggtggtgatggaaatagaacacatcgtattttcatgattgggcaaagaggtattttagaaatacttcactcaagaggcgttccttttatcatgagtgacacaggtggtagagttaaacctttaccaatgaggcctgataaacttaagaatcttgggatgttaacagagccaggtctttactatttatacactgatcatacagttcaaatcgatgatttcccattaccaagagaatggcgtgatgcaggttggttcttggaagttaagccaccacaaactggcggtgatgtaattcagatattgacgcgtaatagttatgcaaggaatatgatgacttttgaaagggttctttctggaagaactggagacatttcggactggaattatgtgcctaaaaatagtggtaaatgggagagagtaccttcattcatcacaaaaatgtcagatattaacatagtaggtatgtcgttttatttaactacggatgatacaaaacgttttacagattttccaactgaacgtaaaggggtagcaggttggaacttatatgtagaagcttctaacacaggtggttttgttcataggctagttcgtaatagtgttacagcatcttgtgaaatattattgaagaactatgatagtaaaacaagttcagggccatggactttacacgaagggagaattataagttaatgagtaatttagagaaatctgtagctataaatttagaaaacacagcgcattatgaaaatatttcaaatctagatataacttttagaacaggagagagtgattcttctgttcttctttttaatatcattaaaaataatcaaccgttattactgagtgaagaaaatatcaaagcacgaatagcgattcgaggtaaaggagtaatgatagttgctccactagaaatattagatccatttaaaggtattttaaaatttcaattacctaatgatgtaattaaaagagatggaagttatcaagctcaagtttcggttgcagaattaggtaattcagacgtggtagttgtagagagaactatcacatttaatgttgaaaaaagtttgtttagcaaggttccctctgaaacaaaactacactatattgttgagtttcaagaattagaaaaaactattatggatcgcgcgaaagcaatggacgaggctataaaaaatggtgaggattatgcgagtctgattgaaaaagctaaagaaaaaggtctatcagatattcaaatagcaaaatcttcaagtattgatgaattaaagcaacttgctaatagccgtatatctgatttggaaaataaagcgcaagcatattcaagaacattcgatgagcaaaagcgatatatggatgagaaacatgaagccttcaagcagtcagtgaatagtggtggtttagtcacaagtggctcaacttcaaattggcaaaaagctaagattactaaagatgatggtaagataatgcagattactggatttgattttaataatccagaacaaagaataggcgattcaacccaatttatttatgtttcgcaagctataaattatccaagaggcgcaagcactaatggtactgtcgaatatttagtagtaacttccgactacaaacgtatgacatatcgtccaaatggtacaaataaagtatttgttaagagaaaagaagtgggttcgtggtctgattggtcagaattagcgcttaatgattacaacacaccttttgaaactgttcaaaacgcgcaatcaaaggctaacacggctgaaagcaatgccaaactatacacagatgacaagtttaataaaagatattcagttatttttgatgggacggcaaatggcgttggctcaacattatatcttaatgaaagtttagatcaatttattttgttaattttttatggaacttttccaggtggagattttactgagtttggcaacccctttggtggcggaaaaatttcattgaacccatcaaatttaccggataatgacggtgacggtggaggcgtttatgagtttggattaactaaatctagtcgtacatcattaactatatcaaacgatgtttattttgacttaggaagtcgaagaggttctggtgcaaatgcaaatagaggaacaatcaacaaaattataggagtgagaaaataatgcaaatattagttaacaagcgtaatgagataatttcatacgctatcattggtggctttgaagaaggtattgatattgaaaatttaccagaaaatttctctcaagtttttagacctaaagcctttaaatattcaaatggggaaatagtttttaacgaagattattcagaagaaaaagatgacttgcatcaacagattgacagtgaagaacaaaacacagtcgcttctgatgacatcttacgaaaaatggttgctagtatgcagaaacaagttgttcaaagtacaaagttatcgatgcaagttaataagcaaaatgcactaatggcaaaacaacttgtgacacttaataaaaaattagaagaggttaaaggagagactgaaaatgcttaaattaatttcaccaacattcgaagatattaaaacatggtatcaattgaaagaatatagtaaagaagatatagcgtggtatgtagatatggaagttatagataaagaggaatatgcaattattacaggagaaaagtatccagaaaatctagagtcataggttataatcttatggctttttaatttgaataaagtgggtggtgtaatgtttggatttaccaaacgacacgaacaagattggcgtttaacgcgattagaagaaaatgataagactatgtttgaaaaattcgacagaatagaagacagtctgagaacgcaagaaaaaatttatgacaagttagatagaaatttcgaagaactaagacgtgacaaagaagaagatgaaaaaaataaagagaaaaatgctaaaaatattagagacatcaagatgtggattctaggattaatagggacgattctaagtacatttgttatagccttgttaaaaactatttttggcatttaaaggaggtgattaccatgcttaagggaattttaggatatagcttttggtcgtgtttctggtttggtaagtgtaagtaatagttaagagtcagtgcttcggcactggctttttattttggataaaaggagcaaacaaatggatgcaaaagtaataacaagatacatcgtattgatcttagcattagtaaatcaattcttagcgaacaaaggtattagcccaattccagtagacgatgaaactatatcatcaataatacttactgtagtcgctttatatacaacgtataaagacaatccaacatctcaagaaggtaaatgggcaaatcaaaaattaaagaaatataaagctgaaaataagtatagaaaagcaacagggcaagcgccaattaaagaagtaatgacacctacgaatatgaacgacacaaatgatttagggtaggtgatgatttatgttaatgacaaaaaaccaagcagaaaaatggtttgataattcattaggaaagcagttcaatcctgatttgttttttggatttcaatgttacgattacgcaaatatgttttttatgttggcaacaggcgaaaggttacaaggtttatacgcttataatattccatttgataataaagcaaggattgaaaaatacgggcaaataattaaaaactatgatagctttttaccgcaaaagttggatattgtcgttttcccgtcaaagtatggtggcggagctgggcacgttgaaattgttgagagcgcaaatttaaacacttttacatcgtttggccaaaattggaatggtaaaggttggacaaatggcgttgcgcaacctggttggggtcctgaaactgttacaagacatgttcattactacgacgacccaatgtattttattagattaaatttccctgacaaagtaagtgttgggaataaagctaaaagcgttattaagcaagcaactgccaaaaagcaagcagtaattaaacctaaaaaaattatgcttgtagccggtcatggttataacgatcctggagcagtaggaaacggaacaaacgaacgcgattttatccgtaaatatataacgcctaatatcgctaagtatttaagacatgcaggtcacgaagttgcattatatggtggctcaagtcaatcacaagacatgtatcaagatactgcttacggtgttaatgtaggaaataataaagattatggattatattgggttaaatcacaggggtatgacattgttctagagattcatttagacgcagcaggagaaaatgcaagtggtgggcatgttattatctcaagtcaattcaatgcagatactattgataaaagtatacaagatgttattaaaaataacttaggacaaataagaggtgtaacacctcgtaatgatttactgaacgttaatgtatcagcagaaataaatatcaattatcgtttatctgaattaggttttattactaataaaaaagatatggattggattaagaagaattatgacttgtattctaaattaatagctggtgcgattcatggtaagcctataggtggtttggtagctggtaatgctaaaacatcagctaaaaaccaaaaaaatccaccagtgccagtaggttatacacttgataagaataatgtgccttataaaaaagaggatggtaattacacagttgccaatgttaaaggtaataacgtaagggacggctattcaactaattcaagaattacaggtgtattacctaataacgcaacaatcaaatatgatggcgcatattgcatcaatggctatagatggattacttatattgctaatagtggacaacgtcgctatattgcgacaggagaggtagataaagcaggtaataggataagtagttttggtaagtttagcacgatttagtatttacttagaataaaaattttgctacattaattatagggaatcttacagttattaaataactatttggatggatgttaatattcctatacactttttaacattactctcaagatttaaatgtgcgtaactggcaggtacttcggtacttgcctatttttttatgttataatgtaattacattaccagtaaccaatctggcttaaaactacatttccggtagtcaatccggctatgcagaggacttacttgcgtaaagcagtaagaagctgactgcatatttaaaccacccatactagttactgggtggttgtttatatataacgcaagttaaccaaaactaactctatctaataaaaagtatgaaaaatttattcatatctatctaataaaaagtatgaaaaatttattcatatctatttaataaaaagtatgaaaaatttactcatatctattgcgtataaagttaaaagatattatagttaactatgaagaaagtcaactctctattccgttctttcttcctaacttgcattctttcgtagttagttcgtcaagtaactattaatttagttatatacaatcaggagtgaattgtatagcccggcagaggccatatatctgactgttggtcccgcaggagacttcttccttgccatcactcatatacataatccctacttacattaatgtttgtagggatattttttaaggggtgtactaggtggggaacacaacgtatttaaaaataaatagtgaaaacgatgttgatttacaagacatcttgaatgattttattaattgcttttgcaaaggttatgtggaaattaaaacgaaatataaattgcttcccatctttaaaataaattttcataaaaataatttaccccacttattaggtttgcattacacacataaaaaagtgagcgctaaaaagatcattggaagaatagctgaagggaaaattacacacgaatctataaaaaaacattatgaatatagtaacattaaagataggcttatcaattataattttttgcataaatgctttattgataaagaaatcaggctatgcgttatagttccaaaaaattcaattaatccacaaaagattgatgtagcttttatagatgacaagaacagccaagttatgatactcgggttaaggaagtctaacaataatgatttttatagtccggcgactatgtacgttctgggtaaaaacagttcatatcgaagaatgagaagaacacatgttattagcatagaatggaaaaattaataaattcgcctatcggtgaatcagtatagatcgcatcttaaatggtgtgtttattttactccccctacaaccaacaaaaccacaccacctattaatttaggagtgtggttatttttgtgttttttcggggcaaaaaaagggcagattatttgaaaaagggcaaacgcttgtggaaaatctaaaaggttaaaaataataaagaacttggtataacaagggttttatacatttgcgtacaacgacgaaatgtcaatttaccatcacattatgacgatatgtttattttaaacacacaagctcatgcgcgtcttgatcaaatggcacaacagtttgaagttgtttgtaatggcttgaacgaaaatgaaggacaagcaattcaaacgatggatcaatctgcctctctaatacggtcaaacttaattcaagttaaagaacaattagaaaaactagctgtatactaattaatttattaaatgctacttgttttcattgagaataagtagctttttcaaacataaaagttttacaaacacataaatgggtgatgagctatgtttaaaagaactaaactaatcttaatagcaacattactgctatcaggatgttcaactaccaataacgaatctaataaagaaacaaaatcagtgccagaagaaatggaagcttcaaaatatgtaggtcaaggcttccaaccacctgcagaaaaagatgtggttgaatttgcgaaaaagcataaagataaaattgccaaacgaggcgaacaattttttatggataatttcggtctaaaagttaaagctaccaatgttgtaggtagtggaaaaggcgtagaagtattcgtgcattgtgatgaccacgatatcgtatttaatgcgagtattccatttgataaatcaataattgagagtgatagctcattaagaagtgaggacaaaggcgatgatatgagtactttagttggtacagtgttgagtggctttgaatatcgaacacaaaaagaaaagtatgacaatttatataaatttttcaaagataatgaagagaaataccaatatacaggctttacaaaagaagcaataaacaagacgcaaaatgtcggatataaaaatgaatatttttatatcacttactcgtcaagaagcttaaaagaatatcgtaagtattacgaaccattgattcataaaaatgataaagaatttaaagaaggaatggaacaagccagaaaagaagtgaattacgctgctaatacagatacagtaacaacattgtttagtacaaaggaaaattttactaaagacaatacagttgatgatgtaattgaactgagtgataaactatataattttaaaaataagccagaaaaatctacaattacaattcaaataggaaagcctactattaatactaaaaaagccttttatgatgataatgatccaatagaatatggagtgtatcgtaaagatgaataaattttttttaaaatgctttttaatattctatataaacacataaatgggtgatgagctatgtttaaaaaggcgaaattaatcttaatagcaacgctactgttatcaggatgttcagcgatgaataatgaatcaaaaaaagacacaaatacagaaacaaatacagaaacaaaatcagtaccagaagaaatggaagcttcaaaatatgtaggacaaggctttcaaccacctgcagaaaaagatgcgattgaatttgtgaagaagcatcgtaaagaatttgaaaaagtaggtgaacaattctttaaagataactttggactaaaagttaaagctacaaatgttgtaggtaaagatgatggtgtagaagtttatgtgcattgcgaagatcatggcattgtatttaatgcaagtctacctttgtacaaagatgccatccatcaaaaaggatcaatgcgtagtaatgacaacggtgatgatatgagtatgatggtgggtacagtgctgagtggctttgaatatcgagcgcaaaaagaaaagtatgataatttatataaatttttaaaagaaaatgaaaagcaatatcaatatacaggttttactaaagaagcaattaacaagacgcaaaacgccgggtatcaaaatgaatatttttatattacatatttatcaagaaatttaaaagaatatagaaaatattacgaaccattgatacataaaaatgataaagagtttaaagaaggtatgcaacgagctagaaaagagctaaactatactgctaatacaaatactgtagcaacgttgtttagtacgaatgatgaaaggaatagaaaagaaaagataaataatgtaatagatttatccgagaaaattgaaagaacaaaagatatgccaatcaagaatactataactactcaattaggaaataaacttattggcacaaaaaaagctcgttttgatgataagaaagtagtgtcgtttggagcatttgaagatgaataaaataaatgatagagatttaacagaattgagtagctatagggtttatcaagacatcaataaagataatgactttacagttaacgaaaaacgatttaagcaggcagatgtatttgaagatttatatagagagaaactaaaagacacaaataaattaagagagtataattatttacaaaatgaaacttttaaaagcgcataaataggtgatgagatatgcttaaaaaagcaaaatttatcttaatggcaacgatactactatcaggatgttcaactaccaataacgaatccaacaaagaaacaaaatctgtaccagaagaaatggatgcttcaaaatatgtaggacaaggattccaaccacctgcagaaaaagatgcgattgaatttgcaaagaagcataaagataaaattgctaagcgaggcgaacaattttttatggataacttcggtctaaaagttaaagctacaaatgttataggtagtggcgatggtgtagaagtattcgtgcattgtgatgaccacgacatcgtatttaatgcgagtattccatttgataaatcaattattgacagtgatagctcattaagaagtaaggataaaggtgatgatatgagtactttagttggtgcagtactcagtgggtttgaatatcgagcacaaaaagaaaaatatgataaattatataaatttttcaaagataatgaagagaaatatcaatatacaggatttacaaaagaagcaattaataagacgcaaaatagtggttatgaaaatgaatatttttatatttcggccataccttataatttagctgagtatagagactattttgaaccattgttaaacaaaagtgacagtgaattttcaaaagaattgtcaaatgttaagaagcaattaaaagataagtctaaagtttcggtaactactactctatttagtaaaaaaaagaactatactaaaaaaagtaacagtgaaaatgtaataaaaatggcagaagaaataaaaaaagataaagagataccaaacggtatagagcttagtataaaattttcggacaataaaataaatacggttaaaccaaattttaacggtgaaagcacttcagaatatggtgtgtttgatcaagaataaaattaatgatgaaaatttaacggagaatagtgtatattgagtagatcaagaataaaaagataattctactattgttgtgaaggcaaataagtagaagattttaagtgtaatttctggtgatttaaataataatataaatggaagtactgatataaaactttttaacctactagattcttataatttgctttccattttatgacgatttttactcaattgagtgatagaatcaaaaaagccatctcaaaaattaatcaagcaaacaacattccaaacaatgctcgcaaatcaccaatgtatcactctccaattacgtaactatgatttaatttaagcatagttattgaggttttgtgatatatagtataaaattaatgagaattaaatttaataatgtaaaattcatcttcggggtcgggtgtaattcccaaccggcagtaaataaagcctgcgacctgctagtatgtatcatattagtggctgatctagtgagattctagagccgacagtatagtctggatgggagaagatggaggttttttgttgtgcaataatcctcctattcttacgagatgaatggaaggagaaaattgaatatgcaacaaaataaacgtcttatcacaataagtatgttgagcgcgattgcgtttgtgttaacttttatcaagtttcctataccatttttgccaccatacttaactttagattttagtgatgtaccgtcactactagctacatttacgtttggaccagttgccggtatcgtagttgcactggttaaaaatttattgaactacttatttagtatgggcgatccagttggaccatttgctaactttttagcaggcgcaagtttcttattaactgcttacgccatctataaaaataaacgttcaacaaaatctttgattactggattaatcattgcaacaatcgttatgactatcgtgttgagtattttgaactatttcgttctattacctttgtacggtatgatatttaacttagctgatatcgcaaataatcttaaagtaatcattgtttcaggaattataccattcaatattattaaaggtatcgttatttctattgtatttattttactatatagaaggcttgcgaatttcttgaaaagaatttaatcaaattaaagcaaaataatatacacataataataaaaagcaggtgactatcaataaacgatagcttgcctgctttttctatagaacatttgtctaaaaaatcaattattcaaattttaaagcgtccccatcaaatgattcgtctgcaattttaatagaatctgtagggcatccatcaattgcatcttccatatcttcatataattcctcaggtacttctgcagtaccttggttatcgtcaaggattacgaaagcaataccttcgtcgtcgtaatcatatatatctggcgctgctgcaccgcatgcaccacatgcaatacaagtatccatatcaacgattgtatattttgccaatgtcttcgcctcctttgataaaaatgctaaaatagtaatgtgactaaaattttagacagcatcatttttattttcaaattatccgttttacagagtgagggttaaatttgcaacacattataaaaacagcattacaacaaacatttaactataaaacaaataaaagtatttacaatatcttagttggtaagaaatctcaccaaaccttttttgacgcttgtagtcaacaacagttgtcattatatcacagtttaccactattaaaatatccgtcttttgagctatttttagaaaaaatcaatgaatttaatgctgaaatggaaatcatgttgcatcctagatatacatttgaaagcatggggcaaacatttcaagcaattcaactattagtgcaaaccatgtctaataccaaacaacatgtttttcattttgtaccaatctctcaaaataataagatacaagaaactgtaaagattgtctataactacattaaagaaaaccaattacaaattgattttgaaaatgaactacataacttgtttaaagcaataactttaaaagggccatgttacttacattattatttgcaaggctatgatgaaccaatgtatacgagacagcaagttagtttaatagaaaagctatctcaacagcaattgtttgaatacgaaatgaataatttagtgacaatgatgtttgaattagaaagtggagaatatactattttatcaaaaataataatgaaacctacattattaaatcaaacttatattacttatacaaaattgcttgaacaattcacgatggaagatatagcggctcaacaacaagttaaaatcaatactatcgaagatcatgtacttgaaatcttaatcaaaggttacatgtctaattacgatgattatgttgaactagaagatcaactccagtttttgaatttttatcaacagcatcgtggcgaacgattaaaattttacaaagaacaatttgacacgttatcatattttcaattaaaagtattaatcgttggatttgaaagaggtgatctgaatgttgcatgatattttacgaaacaaatttggattcgagagttttaaaccgggacaacaggaaattatagaaagtataatgtctcaacaacacactctaggtatacttccaactggaagtggaaagagtttgtgttatcaaatacctacgtatttatcaggtaagccgacattaattatctcaccgttaatatctttaatggatgaccaagttatgcagttgaaaataaatggagaaaaacgtgtaacatgtattcactctggtatggatgaaattgagaaaaagcataatattaaatgtttacgacatagccgcttcatctttctaagtccagaatttctcctgcaaccgtcaaattttaaattaatatctatgatagactttggcatgattgttctagatgaagcacattgcctatctgaatggggatatgatttcagaccacattatgctctaataggaaaagtaacaaagcattttaaagaagcggttgtcttagcattgacagcaactgcaccaccgcatttacaagatgatttgacggaaatgttagcgattcaattcaatgttattaaaactacaatgaatcgcccaaatataagctttaagcatcttaattttcatgatgatgaagataaaattgaatggttgctgccgtttctacaacagtcgggaccaacgattatttatgtctcatcgaaaaagatgtgtctgaatttagcgcaacttatttatgattcaggttttcttacaggtatttatcatggtgatatgaattatcaagagcgacacacagttcaacaacaatttttaaataatgatattccgattatagtcgcaacgagtgcttttggtatgggaattaataaaaaagatattcgcacaatcattcactttcatctttcaacaagtccttctaactacattcaagaaattggccgtgcgggtcgcgatggtgaactaagtcaggcaattagtttattccaaccggacgataaatatattttagaaacgttattatttgcagatatgataacagaagaagatgtacaaaatttcgaaataggagaatttttagctcccgataaacaagccgttttgacaacgttgcaatcattctatagtatcggcgccttgaaacagatatttaagcaatcatttaaacgaaagcaattaggattctttcgcatgattggctattgcaaattggatcaatgtagacggaagtatttattagaatttttcggtgaatatccaccggcacaagatcgatgttgtgacaatgattctaatataactgatatcgcaattttaaataagaagaaggtaattagaagtattggatttgatgaaaagttgcaaaatttatttctcagatagtattactttactaaaagaaaattgacaagctataattagtgtatacacaattgaaaaatgattgaaataattttgaaaaatatacataaacatatgtcatgtgggtatattttatgtaaaatcattgtaatagaatagaaaggaagatggctatgtctaataattttaaagatgactttgaaaaaaatcgtcaatcgatagacacaaattcacatcaagaccatacggaagatgttgaaaaagaccaatcagaattagaacatcaggatacaatagagaatacggagcaacagtttccgccaagaaatgcccaaagaagaaaaagacgccgtgatttagcaacgaatcataataaacaagttcacaatgaatcacaaacatctgaagacaatgttcaaaatgaggctggcacaatagatgatcgtcaagtcgaatcatcacacagtactgaaagtcaagaacctagccatcaagacagtacacctcaacatgaagaggaatattataataagaatgcttttgcaatggataaatcacatccagaaccaatcgaagacaatgataaacacgatactattaaaaatgcagaaaataacactgagcattcaacagtttctgataagagtgaagctgaacaatctcagcaacctaaaccatattttacaacaggtgctaaccaatcagaaacatcaaaaaatgaacatgataatgattctgtaaaacaagatcaagatgaacctaaagaacatcataatggtaaaaaagcagcagctattggtgctggaacagcaggtgttgcaggtgcagctggtgcaatggctgcttctaaagctaagaaacattcaaatgacgctcaaaacaaaagtaattctggcaaggcgaataactcgactgaggataaagcgtctcaagataagtctaaagatcatcataatggcaaaaaaggtgcagcgatcggtgctggaacagcaggtttggctggaggcgcagcaagtaaaagtgcttctgccgcttcaaaaccacatgcctctaataatgcaagccaaaaccatgatgaacatgacaatcatgacagagataaagaacgtaaaaaaggtggcatggccaaagtattgttaccattaattgcagctgtactaattatcggtgcattagcgatatttggaggcatggcattaaacaatcataataatggtacaaaagaaaataaaatcgcgaatacaaataaaaataatgctgatgaaagtaaagacaaagacacatctaaagacgcttctaaagataaatcaaaatctacagacagtgataaatcaaaagaggatcaagacaaagcgactaaagatgaatctgataatgatcaaaacaacgctaatcaagcgaacaatcaagcacaaaataatcaaaatcaacaacaagctaatcaaaatcaacaacagcaacaacaacgtcaaggtggtggccaaagacatacagtgaatggtcaagaaaacttataccgtatcgcaattcaatactacggttcaggttcaccggaaaatgttgaaaaaattagacgtgccaatggtttaagtggtaacaatattagaaacggtcaacaaatcgttattccataatataactatataaattgtaactgaactgctatatacaaacgtgcatattataagtatctctaaatattttggagaacttaaattgcgcttataagtatgtagcggttttttcatttttcaaagtttgttatttaacaaggtcttttctcgaatattggcatatcaatttaactttttaaatagtcatcaaaaagataaaacaccacaatcaacaaatttaacgaggaagaataaaaaataaatcaacatattaaattgtagtgttattcaactccgtagctaacaattctctatgcacattaaacaaattgtcaaaaatatatcataaatcttcaagcacagacttagcgcatcaatcactgaactgttataatagtttgggattaaaggaggccgaaacaatgcaaaaagttgaaagtatcataattggtggagggccatgcggattaagtgcggctattgaacaaaaaagaaaaggtattgataccttaattattgaaaagggtaatgtcgttgaatcaatctacaattatcctactcaccaaacatttttctcatcaagtgataaattaagtattggggacgtaccgtttatcgttgaagaaagtaaaccaagacgtaatcaagcgctagtttattaccgagaagttgtaaaacatcatcaattaaaagtaaatgcatttgaagaagtattaactgttaaaaaaatgaataataaatttactattactacgacgaaagatgtttatgaatgtcgatttttaacaatcgcgacaggctattatggtcagcataatacattagaagttgaaggtgcggatttacctaaagtgttccattattttaaagaggcacatccgtattttgatcaagatgttgtaattatcggtggtaagaattcggctatcgatgctgctttggagttggaaaaagctggtgctaacgtgacggttctatatcgtggtggagattattcgccttcaattaaaccgtggatacttccaaatttcacagcattagtaaatcatgaaaaaattgacatggaatttaatgctaatgttacccaaataactgaagatactgtgacttatgaagtaaatggtgaaagtaaaacgatacacaatgattatgtatttgcgatgattggttatcatcccgattatgaatttttaaaatctgtaggcattcaaattaatacaaatgaatttggaacagcgcctatgtataataaagaaacatacgaaacaaatatcgaaaattgctatattgcaggtgtaattgctgcagggaacgatgcgaataccatttttattgaaaatggtaaattccacgggggcattattgctcaaagcatgctagctaagaaacaaacgcccttagaatcataaaaataaaggtctatgtactaaataacttagttttacaacgactgacattcatgatatgtcaaatgaggttgatgactaatgattgtacatagacctttttatgttacgtattcattataattcaaaatatgatttgatttcagctttatctaaattgttgcttaacgcgactaataattttaatcttgcttttggaccattcaagccgttagaaaaaataaaaccttgttgtgcgagttggtaaccaccaccatcgtatgcgtaagttggactcacaataccattaaaggaacgtgaaactagcacaataggtatatttaaagatactaattgttgaatgacttctaatgcgcttggaggtatgttgccttgtcctaacgcttcaataaccataccatcgataccttctcgactataaaaactaaaaatgtcacctggcatacccatatatgcttttactaatggtacatttagtttgtcattgacattttccaatgcttgttggcgatatggcatatgatggaattgcacacgatcctttgtcaatacacctagcggaccatgatttggactttgaaatgtgtttgtattagacgtatgtgttttggtaacattacgcgccgtatgaatttcatcattaaatacaaccatcacgcctttatgacgggccttttcatcagaggcaacgcgaatagcggaaatataattatataatccgtcagaaccaatttcattagacgagcgcattgcgccagtaataacaacaggttgctcgatacctaatattaaatcaagtaaaaaggcagtttcttctaacgtatcggtaccatgcgtgataacgaaaccatcataatatttatttgttactgcttctaaaataatatcctttaattgtttaacatgttggattgtcatatgaggtgatggtacattaaaaggatttaattcatctatttgtgcatattgatttatgacatcttgatgcattgaaatagggttgatatcatttgttactactttattagattggtcttgtgacatactaatggtgccaccagtatgaataacaagtagatgtttcatatatttcctcctatatttaatttacctaattatgataaaatattattcataaaacgacaaggaagggaaatgacgcatgaaagccattaatattgcattagatggtccagctgctgccggaaaaagtacaattgcgaaacgtgtagccagcgaactatcaatgatttatgtcgatacaggagcaatgtatcgtgcattaacatacaaatatttaaaattaaacaaaactgaggactttgcaaaactagttgaccaaacaacattagatttaacttataaagcagataaaggtcaatgtgtcattttagataacgaagatgtaacagactttttaagaaataatgatgtgacgcaacatgtttcatacgttgcatctaaagagccagtacgttcattcgccgttaaaaaacaaaaagagttagctgcagaaaaaggtatcgtaatggatggtcgcgatatcggaactgtagtgctaccagatgcagatttaaaagtatatatgattgcatcagttgaagagcgagcagaaagaagatataaagataatcaattaagaggtatcgaatcaaattttgaagatttaaaacgtgatattgaagctcgtgatcaatatgacatgaaccgtgaaatatcaccattaagaaaagcagatgatgcagtgacattagatacgacaggcaagtcgattgaagaagttactgacgaaattttagcgatggtgagtcaaattaaataatctaataagtcataactatctatttgtaatgtgcaacgcttaacgcatatacaaaatgaatgtgctgataatgatttactcaaattaaaaggtgatttttattcaatgatgaatgaaagttgcctttttatttttggtaaaagttaatgcgtcagtgaattgtgtaagtttttcaaaaagtaaaaagaaataataaaggtgaattattagaattccaaaaataattcattacattcataaagcattttacaaatggtaagaaaatgagtgttacaaatctaaatattgcaaaagaagctgatttagtcacaaaaaatgtcctatgtaataattcgagaaagatgcactatatacggtcttcttactattcaaatgtaaaagttgcttatttgcgtggctttttgttttataaaagtataaaattttactataatatatcttgtagagaacaatgaaatgacagacttataaaacaaaatagtaagctatgctaatttttatacaaaaaatatgtataaacatagcaaactgtattactttgatacaaaaatggttgtaataaatatttatcgatatgacgacttgaatatgataaagtgacatatttatgtatatgactatttcgcaaaatgtaatcgaggtagaatttcttgacaattctgtcagtttataagatgttataaatatgtagtgtataaggaggcaaacaagatgactgaagaattcaatgaatcaatgattaacgatattaaagaaggtgacaaagtcactggcgaggtacaacaagttgaagacaagcaagttgttgttcatatcaacggtggtaaatttaatgggattattcctattagtcaactatctacgcatcatattgatagcccaagtgaagttgtaaaagagggcgacgaagttgaagcatatgtcactaaagttgagtttgatgaagaaaatgaaactggagcttacatcttatctagaagacaacttgaaactgagaagtcttatagttatttacaagaaaaattagataataatgaaatcatcgaagcgaaagtaacagaagtagttaaaggtggtttggttgttgatgtaggacaaagaggttttgttccggcttcactaatttcaacagacttcattgaggatttctctgtgtttgatggacaaacaattcgtattaaagttgaagaattggatcctgaaaataatagagtcattttaagccgtaaagcagttgaacaagaagaaaacgatgctaaaaaagatcaattattacaatctttaaatgaaggcgatgttattgatggtaaagtagcgcgtttaactcaatttggtgcatttatagacattggcggtgttgatggtttagtgcatgtatctgaactttctcacgaacatgttcaaacaccagaagaagtagtttcaattggtcaagatgttaaagttaaaattaaatctattgatagagatacagaacgtatttcattatcaatcaaagatacgttaccaacacctttcgaaaatattaaaggtcaattccacgaaaatgatgtcattgaaggtgtcgtagtaagattggcaaactttggtgcatttgttgaaattgcaccaggtgtacaaggacttgtacatatttctgaaattgcacacaaacacattggtacgccaggtgaagtgttagaacctggtcaacaagtaaatgttaaaatattaggtattgatgaagagaatgaaagagtatcactatctattaaagcaacattaccaaacgaagatgttgttgaaagtgatccttctacgactaaggcgtacttagaaaacgaagaagaagataatccaacaattggcgatatgattggtgataaacttaaaaatcttaaactataatttaatatttaatagtcaactccacatgtttatgattgcatgtggagtatttttatgtaacaaaatatactcggaatgataacgtggacaaatttaactaagtgtttaaaaagataaagttttaagtgctgatttttatcattacagtaataaactcattttgaatacacagtctcatgtgatattattaaaaagatataagaaagagaggaagttagcttatgactaaacctatagtagctattgtaggtaggcctaatgtaggtaaatctacaatttttaatagaatagttggagaacgtgtttcgattgtggaagacacgccaggtgtaacacgagatcgtatttattcttcaggtgaatggttaacacatgatttcaatattattgatacaggtggtattgaaattggtgatgcaccattccaaacacaaattagagcgcaggcagaaatcgccatagatgaagcggatgttattatttttatggttaacgtgcgtgaaggattgacacaaagcgatgaaatggtcgctcaaattttatacaaatctaaaaaaccggtcgtattagcggttaacaaagtagataatatggaaatgcgtacagacgtgtatgatttctattcattaggatttggtgaaccgtatccgatatcagggtcacatggtttaggtcttggtgacttgttagatgcagttgtttctcattttggtgaagaggaagaagatccttatgatgaagatacaattcgactatccattattggacgaccaaacgtaggtaaatcaagtttagtaaatgctattttaggtgaagatcgcgttatcgtttctaatgttgcagggacaacgagagacgctattgatacagagtatagttatgatggacaagattatgttttaatcgatactgctggcatgcgtaaaaaaggaaaagtatatgaatcaactgagaaatattcagtattaagagctttaaaagcgattgaacgttcaaatgttgttttagtggtcatagatgcagaacaaggcatcattgaacaagataaacgtgttgcaggatatgcacatgaacaaggtaaagcagtcgtgattgtcgtaaataaatgggatactgtggaaaaagatagtaaaacgatgaagaaatttgaagatgaagtacgtaaagaattccaatttttagattatgcacaaattgcttttgtgtctgctaaagaacgcacaagattacgtacattattcccttacatcaatgaagcaagtgaaaaccataaaaaacgtgttcaaagttcaactttaaatgaagttgttactgatgcaatttccatgaaccctacaccaacagacaaaggtagacgtttgaatgtcttttatgcaacacaagttgctatagaaccaccgacatttgttgtatttgttaatgatgtagaattaatgcatttttcttataaacgctatttagagaatcaaatccgtgccgcttttggttttgaaggtacaccaattcatattatagctcgaaagagaaattaacgattgggggataacaatgactaaaattaccgtttttggtatgggaagttttgggacagcccttgccaatgttcttgcagaaaatggacatgatgttttgatgtggggtaaaaatcaagatgctgttgatgaattaaatacatgtcatacaaataaaaagtatttaaaatacgcgaaattagatgttaacatcatcgctacttcagatatgaccaaagcaattcaatttgcagatatttacttaatggctttacctactaaagcaatgcgagaagttgcttctcaaattaatgataagctgacctctaaaaagacttttatacatgttgctaaaggtattgaaaatgggacgtttaaacgtgtgtcagaaatgattgaagattctatttcacctgaatataatgcaggtattggcgtgttgtcagggccaagtcatgcggaagaagttgtagtcaagcaaccaactacagttgctgcttcatcaaaagataaaagtgtaagtaaattaacgcaagatttatttatgaatgattatttgcgtgtgtacacgaatgatgacttgattggtgttgaacttggtggtgcattgaaaaatatcatcgcagtagcaagtggtatcgtagctggaattggctacggagataatgcaaaagctgcattaatgactcgtggcttagcggaaattagtagattaggtgaaaagttaggtgccgatcctatgacatttctaggtttaggtggtatcggtgacttaatcgttacttgcacatcaacacattctcggaatttcacattaggatataaacttggacaaggtgaatcaatggatcaagcattatctgaaatgaatatggttgttgaaggtatttatacaactaaatcagtttatcatttagctaaagaaaaaaatgtggatatgccaattacaaatgcattatatagagtattatttgaaaatatctcagtaaaagaatgcgtaaaagatttaatggagcgcgataaaaaatctgaataatatgtgtattattacacatatacggctaataattacgtaaaatgaatagaaatggcttaaattcaacgtttttgccacataaatgattgcgatttatgtaatgcttgtgttaaagttttaccataatgatataaacatatcattatcaaacctcaggaggtgaatgtctaatgaacaaaacagatttaatcaatgcagttgcagagcaagctgatttaactaaaaaagaagctggttcagcagtagatgctgtattcgaatcaatccaaaactcacttgctaaaggtgaaaaagtacaattaattggtttcggtaactttgaggtacgtgaacgtgctgcacgtaaaggtcgtaaccctcaaactggtaaagaaattgatatcccagcaagtaaagttccagcattcaaagctggtaaagcattaaaagatgctgtaaaataattttacttaaaaagccctgaataagggctttttattttgcttttaatacttacaacctgtacataaattgtaatgttcttctaagtttttaatctttggaacattcattgtttaagcgttcaaaatattacatgacataatagttttgataaaaatagcaactacaaaatatacatatgaatattgagattaattgttagcgttgaatttacttaaaaggtaaccatgtctactatagtattttacgttatttaaaaagatgaataatgtaaatgaagtaaaggttattatgagaattacaaaagctacataaattactgttagtttaaattgaaatttaaaaatgataagtaatcttaatgcttcaaaagattttaatttcttacatataatgttaatatgaatagtgataatatcgtgaggtgtagacatggaaacaactgttagcaaattggaaagacaaatagaagaaagattaaagggcgtatcagaatatgaatccattaatattaatcatcggttaggtaagttacttgatttatatgatattccagatgttgccaaagtggcatgcctcacaattgacacatcaatgagacaccttgatgacattacatataatcatttgtctaaacattccattttgattggagatttaattagtgcacatttttatacgctactagcagaaatcaatgatttatcatttcaaaatgaaattagtaaagcaattgttgaaattaatgaattgaaatcttcattacatcatcaagctttaaatgattatgaaatttctcaagcaatagtaaaaattgaaacacttttcccatatattacgttatctcatttcggtatcaatattgatgagtcggaaatatataattatttatttgaagatatgtctgattactatccatcatacttcaagaaatataataaaagtgaagtaaagcattacttacacgatatccaaaaaagttatttaaaaagtagaggtaattaagcatggctgacaataaagcaaataaagagcaagtacatcgcgtttttcaaaatatttcaaaaaaatatgatagattaaataatattattagttttgagcagcataaagtatggagaaaacgcgtcatgaaagacatgggtgttagaaaagggacgaaagcattagatgtttgttgtggtactggtgattggacaatcgcattaagcaaagctgtaggaccaacaggtgaagttactggtattgactttagtgagaatatgttagaagtaggaaaagaaaaaactgcttcaatggaaaatgttaaacttgttcatggtgatgcaatggaattgccgtttgaagacaattcttttgattatgtaacaattgggtttggattaagaaatgtgccagactatttagtcgcgttaaaagaaatgaatagagtacttaaaccaggtggtatggtggtatgtcttgaaacgagccaaccaactttgccagtctttaaacaaatgtatgcactatactttaaatttgttatgcctatttttggaaaattatttgcaaaatcaaaagaagaatatgaatggttacagcaatctacgtttaattttcctggaaaagaagagttgaagcgcatgtttgaagaagcaggtttcataaatgtaagagtacgtagttttacagggggcgttgctgcaatgcaccttggctataaagaaaaagataataccaaaggtgattaacgtggcaaagttaaacatgaacaatgaaattaagaaagtggaacaacgacttgaaaaggcaataaaaagtaaagattctgtattagaacaggcatcattacacttattgtcttctggtggtaaaagagtacgcccagcatttgttattctgagtagccaatttggcaaagatgaacaaacgtctgaacaaacgtatcaagttgcagtcgcattagagttaattcatatggcaacacttgttcatgatgacgttattgataaaagcgacaagcgtcgaggcaagttaaccatatcaaagaaatgggatcagacaactgctattttaactgggaattttttattggcattaggacttgaacacttaatggccgttaaagataatcgtgtacatcaattgatatctgaatctatcgttgatgtttgtagaggggaacttttccaatttcaagaccaatttaacagtcaacagacaattattaattatttacgacgtatcaatcgcaaaacagcactgttaattcaaatatcaactgaagttggtgcaattacttctcaatctgataaagagactgtacgaaaattgaaaatgattggtcattatataggtatgagcttccaaatcattgatgatgtattagacttcacaagtaccgaaaagaaattaggtaagccggtcggaagtgatttgcttaatggtcatattacgttaccgattttattagaaatgcgtaaaaatccagacttcaaattgaaaatcgaacagttacgtcgtgatagtgaacgcaaagaatttgaagaatgtatccaaatcattagaaaatctgacagcatcgatgaggctaaggcagtaagttcgaagtatttaagtaaagctttgaatttgatttctgagttaccagatggacatccgaaatcactacttttaagtttgacgaaaaaaatgggttcaagaaacacgtagtatttatgaaaagtattgaaagcgctttaccaacctgttaatatataatagtaatatacataaacctattaaacacagggggatacataaagtggaacgtacatttttaatgattaaaccagatgcagtacaaagaaatctaattggtgaagtaatttcaagaattgaaagaaaaggactaaaacttgtcggtggtaaattaatgcaagtaccaatggaacttgctgaaacacattatggtgaacaccaaggtaaaccattttataatgatttaatttcatttattacatcagcaccagtgttcgcaatggtagttgaaggtgaagatgcagttaatgtatctagacatattattggcagcaccaatccttcagaagcttcaccaggatcaattagaggtgatttaggtttaactgttggtagaaatatcattcacggttcagattcattagagtctgctgaacgtgaaattaatctatggtttaatgaaaatgaaattactagctatgcttcaccacgtgatgcatggttatatgaataaaatataaactgtaaacctttacgatttatttataaaggtagaaagggttttgttatgtggttagtcattatgattatacataacaaggcccgttttttatgttgtagtaaattacttgaaaaattttatagttttttggtaacacgtattaaaaagagaggaatattctttatcaaatgaaactaaacagagagaaggggttgttaaaatgaagaatattatttcgattattttggggattttaatgttcttaaaattaatggaattactatatggtgctatatttttagataaaccacttaatcctataacaaaaattatttttatactgactctcatttatattttttatgtattagtaaaagaattgattatatttttgaagtcaaagtataacaaaagcgcttaacatatgtatattttaatatcataatttttttaaacggactgattaactttattaataattaacagttcgttcttttgtattaagaaatgtagtcagtatattatttgctaaagttgcgatacgattatattaaaacggctaatcatttttaattaatgattatatgatgcaactgtttagaaattcatgatacttttctacagacgaatatattataattaattttagttcgtttaatattaagataattctgacatttaaaatgagatgtcatccattttcttaattgagcttgaaaacaaacatttatgaatgcacaatgaatatgataagattaacaacatattataatgttatcgtggaagtatgaaaggagcgagtgtgtatgagatacctaacatcaggagaatcacatggacctcaattaacagttattgttgaaggtgtacctgcaaatatagaaattaaggttgaggatattaataaagaaatgtttaagcgtcaaggcggttacggacgtggacgtcgtatgcaaattgagaaagatacagtagaaatagtatcaggcgttagaaatggttatacattaggtagtccaattactatggttgtaaccaatgatgactttacgcattggagaaaaattatgggagcagctccaataagtgaagaagaacgtgaaaatatgaaacgtactattacaaaaccaagacctggtcatgcagatttggttggaggtatgaaatataatcatcgtgatttacgaaatgtgctagagcgatcatctgctagagaaacagcagctcgagttgcagtcggtgccttatgtaaagtgttattacaacagttagatatcgatatatacagtcgtgttgttgaaataggtggaattaaagataaagatttttatgattcagaaacatttaaagcaaatcttgatcgtaatgatgttcgtgtaattgatgacagtatcgcacaagcaatgcgagataaaattgacgaagctaaaaatgaaggagattcaattggcggtgtcgttcaagttgtagttgaaaatatgcctgttggtgtaggtagttatgtgcattatgatcgtaagttagatggtaagattgcacaaggtgttgtcagcataaatgcttttaaaggtgtaagctttggtgaaggatttaaagcagctgaaaagccaggtagtgagattcaagatgaaattctatataatagtgaaattggttattatcgtggatctaatcacttaggtggtttagaaggcggtatgtcaaatggaatgccaattatcgttaatggtgtaatgaaaccaattccaacgttatataaaccattaaattcagtagacattaatactaaagaagactttaaagcaacaattgaacgttctgatagttgtgctgttcctgcagcaagtatcgtctgcgaacatgtcgtagcatttgaaatagcaaaagcattattggaagaattccaatcaaatcatattgagcaacttaaacaacaaattattgagcgcagacaattaaatattgagttttaacaacaagaacaattgaggtgtaatcatgaaattacaaacaacatacccttcaaataattatccaatatatgttgaacacggtgcaattgaccatattagcacgtatattgatcagtttgatcaaagttttatattaattgacgagcatgtaaatcaatattttgctgataaatttgatgatattttatcatatgaaaatgtacataaagttattattccagctggtgaaaagacgaaaacatttgagcaatatcaagaaacattagagtatattttatcccatcatgtaactcgtaatacagcaattattgctgttggtggtggtgcaactggtgattttgctgggtttattgcggcgacacttttacgaggcgttcactttatacaagtgccaacgactatactagcgcatgattctagtgttggcggtaaagtgggtattaactcaaagcaaggtaaaaaccttatcggtgcattttatcgtccaactgctgtgatttatgatttagactttttaaagacgttaccatttgagcaaatattaagtggctatgcagaagtttataagcatgcgttattgaatggtgaatcagcgacgcaagatatcgaacagcactttaaagatagagagatattacagtcattaaatggtatggataaatatattgctaaaggtattgaaacgaagctggatattgttattgcagatgaaaaagaacaaggtgtacgtaaatttttaaatttaggtcatacatttggtcatgctgttgaatactatcataaaatacctcatggtcatgcagtgatggttggcattatctatcaatttatagttgcgaatgctttgtttgattctaagcatgatattaatcattatattcaatatttaatacaactcggctatcctttagacatgataactgacttggattttgaaacgttataccaatatatgctaagtgataaaaagaatgataagcaaggtgtacaaatggtcttgattagacaatttggagatatcgttgtacaacatgttgatcaactaacattacaacatgcatgtgaacaattaaaaacatattttaagtaggtgaatgaaatggtaaatgaacaaatcattgatatttcaggtccgttaaagggcgaaatagaagtgccgggcgataagtcaatgacacaccgtgcaatcatgttggcgtcgctagctgaaggtgtatctactatatataagccactacttggcgaagattgtcgtcgtacgatggacattttccgactgttaggtgtagaaatcaaagaagatgatgaaaaattagttgtgacttccccaggatatcaatcttttaacacgccacatcaagtattgtatacaggtaattctggtacgacaacacgattattggcaggtttgttaagtggtttaggtattgaaagtgttttgtctggcgatgtttcaattggtaaaaggccaatggatcgtgtcttgagaccattgaaacttatggatgcgaatattgaaggtattgaagataattatacaccattaattattaagccatctgtcataaaaggtataaattatcaaatggaagttgcaagtgcacaagtaaaaagtgccattttatttgcaagtttgttttctaaggaaccgaccatcattaaagaattagatgtaagtcgaaatcatactgagacgatgttcaaacattttaatattccaattgaagcagaagggttatcaattaatacaacccctgaagcaattcgatacattaaacctgcagattttcatgttcctggcgatatttcatctgcagcgttctttattgttgcagcacttatcacaccaggaagtgatgtaacaattcataatgttggaatcaatccaacacgttcaggtattattgatattgttgaaaaaatgggcggtaatatccaacttttcaatcaaacaactggtgctgaacctactgcttctattcgtattcaatacacaccaatgcttcaaccaataacaatcgaaggagaattagttccaaaagcaattgatgaactgcctgtaatagcattactttgtacacaagcagttggcacgagtacaattaaagatgccgaggaattaaaagtaaaagaaacaaatagaattgatacaacggctgatatgttaaacttgttagggtttgaattacaaccaactaatgatggattgattattcatccgtcagaatttaaaacaaatgcaacagttgatagtttaactgatcatcgaataggaatgatgcttgcagttgcttctctactttcaagcgagcctgtcaaaatcaaacaatttgatgctgtaaatgtatcatttccaggatttttaccaaaactaaagcttttagaaaatgagggataatataaaatggaagatatctataaattaatagacgatatcaatctacaaaaactagaaaatttagactctcgtgttaatgaagcaataactactgacaacgatgacgcattatttattctaggagagacactttacaattttggattaatgccacaaggtttggaagtattccgcgtgttatatcacaaatatccagacgaaagtgaattgctgatttattttattgaaggtttaatgtctgaaaatcaaactgacgaagcgttagaatatttaagttatgttgaaccatcacctgaaaagttgatgttagaagcagatttatatcaacaaattaatatgatggaagttgctattgataaattacaagaagcacttgaactagagccaaatgatccaataatccattttgcattggctgaaatgttatattatgatggtcaatatttacgtgctacctctgaatacgaaaccgttttagaaactggtgaatatcaagttaatggtgtaaacttattctctcgtatggcagattgtagtttacaaagtggtaactatagtgatgcgattcgcttatacgatgaaattaatgaagatgaaatgacttcagaagattatctcaaaaaagccatttcttacgataaaaatgacatcactcaagaagcaattaaaataatgactacattactttctaaagatcctgattatattcaaggctacttgtatttacaatcattatatgaaaatgaaaaaaattatccagatgccattgaaacgggtaaagaaggattacgactaagtcaattttataaagagttaatgtatacaactggatgtttggaaatagaacacggcgatgctaatgaaggtgtattattgttaaaacaagcattagaggttgataatgcttaccaagaacctttattgattttaagcgatttatatcgtaatgaagaagattatgaagcaatcattgaattattaacatatgtagatgaagaagatttggatcctacattcatgtggcatttagcgttcgcctatggtcaagaagagcgagataaagaagctcaacatttctttgaattagcatatccaacgatgaaaacaaatattgattttatgagtgattattatttctatttaattgaaattggtcaaaaggaacaagcaattactattttaaatcaattgttggaactagagccaagtaacgaaaattggcatgacgaattatcaagattgcaatcttaaaatggggtatttgatgtcagagacattcaatcaaattaaagaaagttttattgaatatttactttttcaatatcgatttaagtcgcgtattgcagtttgggtgcttaactatataaaagtgaatgaggcgaaattggcaaacattcattttgtagatacaaaaattaatcatcatgaaacattagaaattgcagaagtgggaagtcacgcttctgcaattcaatttactaagcgtaatataaagttaatgaatacaaatgaaatatttgattatatcgctaatcataactgtgcttttgatattcaaattcacttcgcaaacgtgtcaaagcgtgagcaaaggctagatgatttaatagttgctcaactaacggaatcgcccagttatcaaacttatcttcatgacttaaatagtatggctatagatcggcataaacatgcgttattaatagattacttgttacacaatattgatttaagtttacagatgaatgaaaagcaacgtttttatcaactaacgcaaattttaaatacactcaagctagtaaataaacataatcaatttgaggacttagcagatgacaattaaagcattttggcaatatacactttatcaacgttcttggttaatgatgctactcatttgtaatatattagggatgatttatggttatatatggtatggtgaacaattaagtcatacgccctggcattttaagatttttgttccagatagcccaactgcaatattatacttagttatttctatctcattgatattaattcaaaaacaaaatagtattatcgatgcactggcatttgtaacattattcaaatatgggatttgggcagttataatgaatatattatttattattgaacaaggtgatattacagtaaatggtttggtattaatgttttcccacagtataatggctgttcaggcaatttacttctatcctaggtttaaacgttctatgattggaatcagtgtagcgatgatttgggtgtttttgaatgattatattgactattttcaccttcaatttccatattatgattttataactacacatgtgtggcaaattggtgtattatcatgttgtctaagtgtttttggacttttgctttatattgaattaaacaaattattaaagtgtaaatgatttgataaaaacggcaaatgacagtaaaatatttataaaggagagtgagtttattgtcttcaatttttactatgataatttatttcgtaatattaatggtgcttcctttatgggcacaacacaaagttaaatctaactatgagaaatattcacaagttagatcaactagtggtaaaacgggtcgtgaagttgcattagaaattttacatgcaaacggtatttatgatgtcgaagttgttaaaggtgaaggattcttaacagatcattacgatcctaaaaagaaagttgtttcactatctcctgcaaactatgacagaccatcagttgctggaactgcaattgcagcccacgaagttggtcatgccattcaagatcaccaaggatattggttcttaagattcagagcagcattagtacctgttgcaaacctagggagttcattaagttatatgatcatcatgttaggtattatcttaacagcgataggtagtgcatttggttcaactgctttatggattggtgctggtttaatgtcattagcggtattattctcaattgttacgttaccagttgagtttgatgcgagttcaagagcgatgaaacaaattacggcattgaacattgtaaatgaaaaagaatacaagcatgcgcgtaaagtattatctgcagcagcaatgacttatgttgcagcaactgcagtcgctgtagcagagcttgtacgtattattttgattgcgcgttcaagtgattaatcttatagattaacaattaacttaaattagacacttattaactagctaatcacatttttgtgtggttgctagtttttttgtgcttatttttctaatggtagattattcactatattattttattgtagtggtacgtatcataaagttataatcccaatttcaattgatttaatttagttaggaatgcattacatttatataaactgaattattaaacttctaaaataaacaacttgtcatctagtttagctagagtcagtagattgcactaaacatgcatgagacttcaaattgatatatactatattagaaatgcaatataaggagaacgtagaaatgaaatcaatggtagaaatgcaacgtgaagttgatgaatatattggacaatttaaaacaggatatttttcaccattagctaacttagctagattgactgaagaagtgggcgaacttgcacgtgaaataaatcatacctatggtgaaaaaaagaagaaagattcagaggaagcaaatacgattaaagcagaattaggtgataatttatttgtgttgttatgtttagcgaattcaatgggaatagatatgacagagagctttaatgaaacaatggaaaagtttaatacaagagataaaaatcgattcgaaagaaagtgaatttaaaaatatatgctttatttggatttgattaagattaaaaacatccatcaatgaattgcatcgcatgaaattatattatttttaaagtaagtataactagatgaatgattatatatacaacacctgtttttagatatatgaaattataaactcaacattactataaacttaaatttaaacaattatctacgcatcgagaataatagagagaaatagaaagaaaggatgggcaagcgaatgaagataggtataacatgttacccgtccatgggtggttctggaattattgccacagaattaggaattaaattagcagagcgaggtcacgaagtacattttatcacttcaaatatcccgtttagaataagaaaaccattaccgaatatgatttttcatcaagttgaagtgaatcaatatgcagtatttcagtatccaccgtatgatattacgttaagtactaaaatcgctgaagttattaaagaatatgatcttgatttgttgcatatgcactatgctgtacctcatgcaatttgtgggattttagctcgtgagatgtcaggtaaagatataaaaattatgacaacgctacacggtactgatattactgttttgggctatgatcattcactccaaggtgcaattaaatttggcattgaaaaaagtgatattgtgacaagtgtgagtaaatctttagcacaagaaacacatgaaattattgaaactaacaaagaaattataccgatttataattttgtacgtgaaaatgagtttccaactaaacataacacagcattaaaatcacaatttggtatagcaccagatgaaaaagtgttaatacatgtatcgaattttagacaagtaaaacgcatagatactattatagaaacatttgcaaaagtacgtgaaaagatacctagtaaattaattttacttggagatggtcctgaattagtgccaatgcgtcaattgacgaaagagttaaacgtagaagaggatgttttatttttagggaaacaagattgcgtaagtgaattttaccaattatctgacttagtattattattaagtgaaaaagaaagctttggactaactttacttgaggctatgaaaacaggcgtcgttccaattggttcaaatgccggtggaattaaagaggttattaaacatggtgaaactggatttgtcgtagatgtgggtgattgtgattcagcgagtgactatgctatccgattacttgaagataaggtgttatacaacaaacttcagaaaaacatgctagcagatattgctgaacgttttggatcagaacttattacagatcaatatgagtattattatcaaaaaatgctaaatgagcataacaaaagtaaaggcgagtaataatatggataaatcattatttgaacaggcaaggcctatattagaacaaattcaagacaatggttttgaagcatattatgtaggtggctctgtaagagattatgtcatgggaagaaatattcatgatatagatatcacaacaagtgcaacgccggatgaaatagaatctatctttagtcatacgatacctgtaggtaaagaacatggcacgataaatgtagtttttaatgatgaaaattatgaagtgacaacattccgggctgaagaagattatgtcgatcaccgtagaccaagtggtgttacatttgttcgtgatttatacgaagatttgcaacgacgagatttcacgatgaatgcgatagcaatggatacagcatacaaattgtatgattattttgatggtcaacaagatattaataatcgaataataagaactgtaggtatagctgaggaacgattccaagaagatgctttacgtatgattcgatgtttaaggttccagtcacaattatcatttgatattgcaacggaaacattcgaagcgatgcgtatacaaatggcagatattaaatttttatcaattgagcgtatagtgattgaactaactaaattaatgcgaggtattaatgttgaaaagagttttaatcatttaaaatcgctgaaagcatttaattatatgccgtatttcgaacatcttgatatgaatcaaattaatgtaactgaagcaattgatttagaattgttgattgctatagtatcagttaaatttgatattaattactcattgaagcctttaaagctaagtaaccgacaagtaaaagatatcaatcaatatattcaaattatgaatgcattaccaagtattattacaaaagaacaattaaaaatgtttgtttatgattatgatacgcatctcattaaaaatgtaatggttgcagcagacgtgttaaaggcaaatgatattcaaggacatgaaccattaatcgttaaccttcaaacgattgatgaaacattacatcgtttacctatgcataatagaaaagacatgatggttaatggcggtgtacttatggcacatttaaatgccaaaagtggtccgtggttaaaagatgtgctaagacaaattgagatagcgattgtaacaggtaaagtaagcaacgaagaaactgaaattttgaaatgggtggataatcatgtcaaaatatagtcaagatgtacttcaattactctataaaaataaaccgaattatatatctggacaaagcattgcggaatcacttaatatttcacgcactgcagtaaaaaaagtgattgaccaattaaagttagagggatgtaaaatagattcagtaaatcataaagggcatttattacaacagctcccagatatttggtatcaaggtataatagaccaatatacaaaaagttctgctttgtttgattttagtgaagtatacgattcaatagattctacacaacttgctgcgaaaaagtcacttgttggaaatcaatcttcattttttatcttgagtgatgaacaaacgaaaggtcgtgggcgatttaatagacattggagttcttcaaaagggcaaggactttggatgtctgtcgtgttaagacctaacgttgcattctcaatgatatctaaatttaatttatttattgcattagggataagagatgcgattcaacattttagtcaagatgaagtcaaagtgaaatggccgaatgatatatatattgataatggtaaagtgtgtggtttcttaactgaaatggttgctaataatgatggtatagaagcaataatatgtggtataggtattaatttgacgcaacaactagaaaactttgatgaaagtattagacatagagcaacaagtatacaattacatgataaaaataaattagatagatatcaatttttagagatattacttcaagaaattgaaaaaagatataatcaatttttaacgttacctttttctgaaattcgtgaagaatatactgcagcttctaatatttggaatagaacgttgctatttacagaaaatgataaacagtttaaaggacaagcaattgatttagattacgatggctatctaattgttagagatgaagcgggtgaatcacaccgtttaattagtgcagatatagatttttaacactaaagcaaggagagatagctatgggtatggcaacctatgccgttgtggatttggaaacaacaggcaaccaattagattttgacgatatcattcaaattggtataacgtttgtgcgcaataaccaaattattgatacatatcattctatgattagaacaaatttagagattccgccgttcattcaagcgttaacatccattgaagaaaatatgctacaacaagcgccatattttaatcaagttgcacaagaaatctacgataagataaaagattgcatttttgtagctcataatgtagattttgatttgaattttattaaaaaggcatttaaagattgtaatattcaatatcgtcccaaaaaagttatagatacactagaaatctttaaaatagcttttcctacagataaaagctatcaattaagtgaattagcagaggcacatggtattaccttagcaaatgcccatcgagctgacgaagatgccgctactactgctaaattgatgatattagcttttgaaaaatttgaaaagttaccgttagatactttgaagcaattatattatttaagtaaacagttgaaatacgatttgtatgatattttctttgagatggttaggcaatatgatgcaaagccattggataaatcgtacgaaaagttcgaacagattatctatcgtaagcaagttgattttaaaaagccgacaacaaattataatggcagcttgaagtctttatatagcaaagctgtagatcaacttggcttaacatatcgaccgcaacaattatatttagcggaaactatattagatcagctcatgcatagtgaaaaagcaatgattgaagcatcactaggcagtggtaaatcattagcatatttacttgcggccttgatgtataatattgaaactgggaagcatgtcatgatttctaccaatactaaattactgcaaagtcaattgttagaaaaagatattccagcaatgaatgaagcgttgaattttaaaattaatgcactattgattaaaagtaaaagtgattacatttcattggggcttattagtcaaattttaaaagatgacacaagtaattacgaagtgaatatcttgaaaatgcaattgctgatttggattacagagacgccgtccggagatatacaggaattaaatttaaaaggtggtcaaaagatgtattttgaccagaaaattgaaacatatgtaccggcacgtcacgatgttcattattataattttattaagcgaaatgcacagaacattcaaattggtattacaaatcatgcacatttaattcattctgatgttgaaaattcaatatatcaattgtttgatgattgtatagtggatgaagcacatcgcttaccagactatgccttaaatcaagtgacaaatgagttgagttatgctgatattaaatatcagcttggtttgattggtaaaaacgaaaatgaaaaattgttaaaggcaattgatcaactggaaaagcagcgaattttggaaaaattagatattgcaccaattgatatttttggcttgaaggctagtatgaatgagattcatgagttaaatgagcaattgttctcaacgatatttacgattatcaatgattctgatgtttatgatgatgatattcatcgcttccataatgtatttacttttgaaacaaaagacattttgaaggatttacatgcgattatcgataagttaaataaaacgctagaaatattcaatggcattagtcataaaacagttaaatcattacggaaacagttgttgtatttaaaagataaatttaaaaatatcgaacaaagtttaaaagctggacatactagtttcatttcgattaaaaatttatctcaaaaatcaacaatacgtttatatgtgaaagattacgctgtaaaagatgtattaacgaaacaagtattggaaaaatttaaatcgctcatttttatatctggtactttaaaatttaatcattcgtttgaagcttttaaacagttattcaacaaagatgttcactttaatacatttgaagttaacacgtcgttacaaagtgcaaaaaatacaagtgtatttataccgagtgatgtagcatcttatcaatataaaaatatagatgagtatgtagcatcgattgtaagctatattattgaatatacgactataacgtcatcaaaatgtttagtcttatttacgagttataaaatgatgcatatggtacaagatatgctaaatgaattgccagaatttgaagattatgttgtattaacacaacagcagaaccaaaattataaaatagtacaacagtttaataattttgataaggccatactgcttggtacgtcaacattttttgaaggttttgattttcaagcaaatggtattaaatgtgtgatgatagcgaagttaccgtttatgaacaagcataatgcaaaatattggcttatggattctgaattcacttcaactttcaaggaatatgtattacctgatgcagttacacgttttagacaaggacttggaagattaattagaaatgaaaatgatcgcggcataatagtttcatttgatgatcgactcataaacagtaattataaaaacttttttgaacaaacacttgaaaattatcgtcagaaaaaaggcgacattcaacagtttggaaaattattaagacaaattcaaaaaaagaaaaagtgaaatacaaagtaaaattcttgtgacatgacatgtgctatgttctgttacaagaatttttgtttggtcgtcaaaatttgagttttataattaaacttgaatgttagcacaaaaaacgaccttcatactaataatattgaggctttattatatattttgtctgaaactgatgattgtattgtcttaatataaattaatgttcaaatctgtgcgtaaatcattaccatttacacgttatcttttagtctagttctagaacttgaaagcggattttgttaaaatgaatgagtattgtataacgaaaaaataaataggagaatggttatgaaaacaacgattaaacaagcgaaagatcatttaaaccaagacgttacaattggtgcttggttaacaaataaacgttcaagtggtaaaatcgcctttttacaattacgtgatggaacaggctttatgcaaggcgtagtagttaaatcagaagttgatgaagaggtattcaaacttgcgaaagaaattactcaagaatcatctctatacgttacaggcacaattacagaagataatcgttctgacttaggatacgaaatgcaagtgaaatcaattgaagttatttcagaagcgcatgactatccgattacacctaaaaatcatggtacagaattcttaatggatcaccgtcatttatggttacgttctaaaaaacaacatgctgtaatgaaaattagaaatgaagttattcgtgcaacgtatgaatttttcaacaaagatggatttacaaaggttgatccaccaattttgacagcaagtgcgccagaaggtacaagtgaattattccatactaaatactttgatcaagatgcgtttttatctcaaagtggtcagttatacttagaagctgcagcaatggcacacggaaaagtattttcatttggtccaactttcagagctgaaaaatcaaaaacacgtagacacttgatcgagttctggatgattgaaggagaaatggctttcacaaatcatgctgaaagtttagaaattcaagaacaatatgtaacacatgttgtaaaatcagttttagaaaattgtaaactagagttgaaaattttagagcgtgatacatcaaaacttgaaaaagttgcgacaccattccctagaatttcatatgatgatgcaattgaattcttaaaagcagaaggctttgatgatattgaatggggcgaagattttggtgcgccacatgaaacagccattgctaatcattatgatttaccggtgtttattactaattatccaactaaaattaagcctttctatatgcaaccaaatcctgaaaatgaagaaactgtattatgtgcagacttaattgcacctgaaggatacggtgaaattattggtggatctgaacgtgtggatgacttagaattgttagaacaacgcgttaaagaacatggattagacgaagaagcatatagttactacttagacttacgtcgttatggtagtgtgccacactgtggatttggtttaggtttagagcgtacagtagcatggatttctggtgttgaacacgttcgtgaaacagcgccattcccaagattattaaaccgtttatatccataagttttagggtcgttacttaaaatatatattatgataataaaaagaatcgtccagcctatattaatagctgggcgatttattcttggaaaatgaagattgataacggcttatattaatcatgaacaaacttttgtttagtaactatatttggaaaataaatagttcatctgattatccataaagttcattgttaaaatctagtgttaaaaaatactgttatttaaaatttgtttgctactagttaaatatattaagcattttagtcgaaaattaaagaaaatgatttatactattaagtaatggttaaatttaaaagggggcacgaacatggataaatatcaattaaaagcaagacctgtagtgatacgaagagaattattagaccattacagtgacttaggtttagatgagcaagatttagtcattttgcttaaattgatttatgcttccgaaacatcaaataaacagccttcaattgaattgcttcagaagggctcaactatgcaaccacgtgatattacaatggttattcaaaatttgatacaacgtgaattgctagaattacaagttcaaaaagatgaagaaggtagatttaccgaatatatgaatctagatccttttttcgaaaaattaagtcatatattgaagcaacaaagtatggaaacgaaagagctaaatagtaaagaaaaatttaaacaattatttagagttttagaggatacatttgcaaggccgttatctccatatgaaatagaaacgttaaatcaatggattgatgttgataaacacgatactgcaattatacaagcggcattagacgaggcgaatagtttgaataaacttagctttaaatatatagatcgtattttacttaattggaagaaaaacaatgtcaaaacaattgacgattctagaaaaataagagaaaaattcaataaaccgaaaatgacgcacacagttaaaacggtacctaaatttgattggttaaacggggagaaccttgatggtaagtaagaaaaaagcattagaaatgattgatgttatagcaaatatgtttccggatgcagaatgtgaattaaaacatgataatccgttcgaattaactattgctgtattattgtcagcgcaatgtacagacgttctagtaaatagagtaacaactgagctgtttaaaaaatacaaaacgcctgaagattatttggcagtcagtgatgaagaacttatgaatgatattcgttctatcggtctgtatcgtaacaaagctaagaatattaagaaactttgtcaatctttgattgatcaatttaatggagaaataccacaaacacataaagaattagaaagtttagcaggtgtaggacgtaaaactgctaatgtagtcatgagtgtagcatttgatgaaccttcattagctgttgatacgcatgtagaacgtgtttctaaacgcttaggtattaatcgttggaaagataatgtgagacaggtagaagaccgtttatgttctgtcatacctagagatagatggaataggagccatcatcaactcattttctttggaagataccactgtttagcccgaaaacctaaatgcgatatttgtccactattagaagattgtagagaaggacaaaaacgttataaagctagtttgaaagaagcgtgataacatgacaaatattacaaaagaggtatttgataatttagaacaagagattgatttatttgccaaaaataagacattaggttctagtgaagcaaagccctacttggatgaataccatagtaaaattattgattattttaagcaggttaatgacataactggcaatattgattttgataaattaaatcaatatcctgttgtgccaatgaattttaaagaaagatatgattatatgattgaacgtaaatatcattttatgggctatcgacaaatgaagacctttaaaactgaattgattaaaatgaatgctagttatcaaacaaggttaaagaataagcaggtatagacaagattgatcatttcctaatgttgaaaatatataaaactaattcatgcacacatatttataattatgttaggtgtcgtgtcattacaacgtcttaatataaaaactgtccatctacatcataatggatatcttgagatatgctttaagatatctatttcgaatcgtaggtggatttcttatatctatgattgtgaaaatatgttgcaaacatgttgatatttcactgattaacgtacacagggaattaataaatatatcaatttaaaacagcgtctaagatgactatgagaaaatataatcataattttaaaaatgggaacaaccacttattcaaattcaataattttacatagctaaagatgtgaatatgaaaaactatttagatgtttcaaaatgtatgtgaatgactgattttacggtttctactaatatagcaatagcgtatgaatacttataaaaaaagcaggaagttttaccttcccaccataaaagatgaagaacctaaaaaaatcctcggctacaccataaatatggtataactgaggattttatgttgagtggattagttgaatatacctgttaatccaccgctgtttctagattgttgagatctagtattgttatttgattgtgcagtaccactgctgtttgctgatgtgtcactaccaccgtgtgtactacgatttgtagtgttgttatcttgactaccagaaacattgattgatgggatactaccacttactgagctaggacgtttaaagtcttcgccatctctagatgaaatttttgacatcacattttcatataagaactgtggatattcttgttggctatgtcccacaaatgagttttcaccatattgtttaactttactgaagcccatccacactgacatagtgtattgaggtgtaaagccgttaatccacacgtctttcgctgcattatcaggtaaattatattgtgaataagtttcagcaccgtaagtaccagtacctgtcttagcacccatatttactccagatacaccatggccatatgcagaaccatatggtttaaatgtaccttttagcatctcagctaacatgtatgcagtgtaatcactcatcgctttatggctagtatgatcgtattcgattgtttcaccatcacgagtaactactttttgaattgaatgcgcgttgttataagtaccaccgttagcgattgcagcaaatgctgatgctaattgtgttggtgagaattctgaagcagaaccaccaagtacttcagatggaccaatatcgccttcgtagtttaagccaagtttggcagcgaatttcttaggtgcatcattaccagcattttgcttaactgattgccaagcttttaaagctgggatattgaaactttgtcgtaaagcatcataaatagatacagtaccgtgactcttcgtatcatagtttctaaatgtagaaccatcaacttgatatgaagattcatcttgaatcgcatggtttgttgcccatttcatattttcaatggcaggtccatacgctaagaaaggttttaaagatgaaccagtagggtgaggatctgttgcttggtttctgttaacgacgtctttgaaatcacgtccaccagatatagcaactaaaccaccagttttactatcaagaattgttgcaccaacttgttggtctttattcttgtagaagctaccattatcaacatcattttgtaatgttttttgaacatctttatccatgtttgtataaattttaataccactttgtaatacattacctaaattttcatctttgaatgctttattattcattaattcagattttacaaagttaacgtatgaattatactcagaatcttgatttgtatcaatgttttgacgttcttcaggagtacgatttactaagttcgcttttaaatcgattttcttagcatcttcccactgtttatctgtaatgcgtttatgataatgcattaagtataaaacagtgtttttacgatcttcagcagcttttggatgatcataaatattatagttgtttggaacctgaggtaaaccggctaaataagcttcttccgctaagtttaaatcttttaaatctttattaaagtaatacttagcagcagctttaatacctgttacgccatcagaatagtaaattttgtttagatatacttggaagatatcatctttactatactcttgttctaaacgatatgataagtatgcttcttgagctttacgtccaatagatttatgttgtgataaaaatgcatctttaacaacttgttgtgttaatgttgaggcaccttcagaaccaaatccaccagtcaagttcttaccaattgcaccgaataaacgtttataatcaagtgcgccatgttcgtagaaacgattgtcttcagttgtaagtactgcgtctttcattgatttcggcacgtcttttaaatttacatgctcatgtctttggccattatctaatgttttaacaagttctccgttcttgtcatatatctttgcaggaatcggatcttgtaatttagcttcggtaaaagcaggtgctttccaagcataataagcaaacaataagatacctagtaaaagaacaacgaaaaatgcaataatcatgaagccaataatcttaataatcgttctcttcacatttctattcttttttgagttggatttcccaccattattaccgtttttcttaggctgagaagatcctttgttttccgtcatacgcggtcctcactttcatctaatatcaacttatcaactgcttttagatagtctaatcttggttgatactgataaggaatatggtaaccattttttcgtatttcatcaactgttatagactttttaatattatctttatatctcttccaaaatacttcgaattttgaatagggtaaaagataaacttcatctagcgttttaaaacgaatcattaaaaacacaatacctttttgttgatatgcatttttcatatgttcgacttgatggtcatgaatattatttaaaggaaaggacgtcttgtttttagtttcctttgcttcaaaatcaatataataaccttgataaacgccgttgtaatcagttgttgaaggtgtacgaaaataagcttcgttaatcacagctttactccgcttaggatagttgacattaactatttgtactggcgtaggctttttgtgaataactgcaatgtcgcttttaagataaaacgtatttgaatgttcgatatctttttcaagtgacataccacgtccaccatactcaatattactaaaggcagcggtctttttccctccgtctatagcactatttttacgatatggtttaccatttggataattcataaatttcaccacacaagtttggtagtaaacgttgtttattatacacaacattatagtgaaacaccaaacttaaattagtataaatgcgaaagacacaatacaccaaagcttattttaacgtgatttcagcattaacacaataatattataatacatttaccgttaatgttggaattttacacacaattttaattaattgaaaagttttgcttataaaaatgaatactcattacaatatttttgaattttgttataaaagtcaaatcatgattagtaatttttatttttgaggcaagtacaagtatgtgttgttaatcagcagaggtgtatttgatttaaatgattttattagattaaaagtattttcatcgtataacaacatacacgataaaattttgtatttatataggaagtttttagatttacttgatttaacagataacacatttgaaaaaatagttaaatcaaattatatagagtgttaaaacatgacgaatacagtatattgtgataaattaaaaaatgtaggaggcgtcctcatgaatgatgtagtcgaatcactaatttatgaagttaacaacatgcaacaaaattttgaaaatgtgaaatcacaacaacaagatcatgatttttaccaaactgtaaagccatatactgaacatattgatagcatactcaatgagatcaaattacatcgtgaatttattatagaagtaccttatatgaattcaaggaaatttgagctactgattgctaacattgaacaactttctgtcgaatgtcattttaagcgaacaagtcgaaagttatttatagaaaagcttaaaagtgttcaatatgatttacaaaatatattagatggcgtaacaaaagagggtactgatggttaaaacagtttatgtaacaggttacaaatcattcgaattaaacatttttaaagatgacgcacctgaagtacattatttaaaacaatttataaaacataaaattgaacaactgttggatgaaggattagaatgggtgttaatacaagggcaaatgggtatagaattatggactgcagaagttgttattgaattacaacgaacatatgattcgttaaagtttgctgtaattacaccgttccaaggacatacagaaaagtggaatgaacataatcaaagtaagtatgccaacataattaagcatgcagattatgttgatagtatttttcatacgtcgtatcaaggtccttttcaatttaaacaagcagatcaatttatgcttgaacattcggatcaaacattgctcatttatgatgaggaacaagaggcgagtcctaagttcttcaagcagatgttagttgattttatggataaaacaaactatacttgtgatattgtgacgttcgatgaattaacagcattcatcaatgacttacagtggtctgaagatcaaagtttctaatgaggtggaaaaaatgtcagatgtttcattgaaattatcagcaaaagatatttatgaaaaagattttgaaaaaacgatggctcgtggctatagaagagaagaagtagatgcatttttagatgacattattgctgattatcaaaaaatggccgatatgaataatgaagttgtaaaattatcagaagagaatcataaacttaaaaaagaattagaagaattaagactacgtgtagcaacatcaagacctcaggacaataaaagtttttcttcgaataatacaacaacaaatacatcttcaaataatgtagatattttaaaacgtatttcaaacttagaaaaagctgtatttggtaaataattactaaatacaaaagtttaactgtcttactaataatgactatgttataattttaaaagtgatattttgggtaatcgctatattatatagaggaaagtccatgctcacacagtctgagatgattgtagtgttcgtgcttgatgaaacaataaatcaaggcattaatttgacggcaatgaaatatcctaagtctttcgatatggatagagtaatttgaaagtgccacagtgacgtagcttttatagaaatataaaaggtggaacgcggtaaacccctcgagtgagcaatccaaatttggtaggagcacttgtttaacggaattcaacgtataaacgagacacacttcgcgaaatgaagtggtgtagacagatggttatcacctgagtaccagtgtgactagtgcacgtgatgagtacgatggaacagaacatggcttatagaaatatcactactagtttagctctcctagatgatggagagcttttttcatgaaaagaacacttaaaattaacgccttgtcttgatataatgacactgccttgttttaaaatagtaagcggatgcgttaatgtatcagcgattaaatttgttggaaatgtataaaaaacacaagctaagaataaaatacctgtataaaaggagaatcatatatgtttcaattacttgcagtttgtccgatgggattagaagctgttgttgctagggaaattcaagaattaggctatgaaacaaatgttgaaaatggtcgtatattttttgaaggagacgcaagtgcaattgtaaaggcaaatttatggttgcgcacagcagaccgaatcaaaattgttgttggacgttttaacgcaacaacgtttgacgaattattcgaacaaaccaaagcgctcccttgggaatctataattgataaagagggtaacttcccagttcaaggtagaagcgttaaatcaacactacatagtgtgccagattgtcaggcgataactaagaaagctattgttgaacgattacgtcgcgcatataacgaaaaaggttggttaaatgaatcaggtgccaaataccctgttgaagttgccattttaaaagataatgtattattgactatcgacacatcaggttctggtttgaacagacgtggttatagattagcacaaggtgaagcaccaattaaagaaacgttggcagcaagtttaatccgtcttgcaaactggaaaggtgatacacctttaattgatccattttgcggttcgggaacaatagctatagaagcttgtttaattgctcaaaatatcgcacctggttttaatcgcgagttcgtatcagagcaatggaacatcatgccagcaaatatttatgatgattaccgtgatgaagcggataagatggctgattatgataaagaaatcgaagtatatgcttctgatatcgatccagaaatggtagagattgctaagcgtaacgctgaagaagttgggttgtctgatattattaaatttagtgtaaaagatgtcaatacattaacaattgatacagaagaaccggtggcgttaattggaaatcctccatatggtgaacgtattggtgatcgtgaagaagttgaagaaatgtaccgttatattggtaaactaatgaaacaacatccatttttatctacatacattttaacaagtaataaagaatttgaatatttagtagatcgtaaagcaacaaagcgacgtaagttatttaatggatatatagaatgtacttattatcaatactggggtaaaaagacagaacgtaaaactattgaaaactaaagtgtttctaatgcgtgactaaaattagtaataattaagttctcatgataataggtatttttgaaaaatgaaggagtctataaatgggtaaaaaaatgggtctaggtttatctattgcattggttgttattggtattgccgttgtatgtttaatgattttttctagtcaaaaaacgacttattttggttatatgaatagtaatacaaatgcagaaaaagttgtcagtgaaaaagatggattagtcaaacataatatcaaagtagaaccatctaatgatttcaagccgaaaaaaggagactttgtaaaattagtttctaaagatgatgggaagacattttataaacaagagattgttaaacatgatgacgtcccacacggtttaatgatgaaaattcacgacatgcatatgaattaataaaaaagcatctataacgtaattttgaagaagtagagttatcttcttatgcgttttagatgcttttttatcttcaaattcaaaaaatcggacagataaaaagtaaaaactttccatcagtacgatttattatagaacccgttttaagtaattagagagacgagaatcattttgtaaatttcgtcagttcaaaactttaagtgcattattgtttagcacgacgatctttaatatataatattaattcaattataaatacaaggataagtgataatccaaataatggcattaataatcctaatacaattaaacatattatgagtgatatagatgctggtttttttacgcgatgtggtacttttactgcagtattttttgtacgctttatccaagagacaaaccccatgccaatggctactaataaagcgatacatacaaataaattaatgattttatttaaaatgccgaataaatgaccttcgtgaagcggaatgccccatgtaaaccatttagcaataataccgtagtcatcatatttaatcgtacctagctttttaccgctatattgatcgaaataaagtgtttgttccttgtatggtgatacatctagcccagtaacacctgaattactagtattagatacaataaaggtaccatttttatcacttggatatacgattgaaaacggctttttaataccagctttttgcgcctgttcaacgaccttatcaatagatatttgataatctaatttggtttgaggcattgctgcattaccatgatgaccacttgaacctttttcggatgaagctggctgtttatttttacgtgtagcccaaggtaattcgttcaaatctgatttaggtggattaatcgctaattcaccttgaccaaggtcaccgtttgtgtccatcataccggcaattttactgcccataaaaccagaccatggcaatccagttaagactaatacaaatactggaattgcaatgataactccaatcattgcgtgccacttttgccaacgaagtgccttacttttgttagaaattaaatgcttcttaatgagtaaataagtaccagataaaatcatgaatatcatccaacatgcggttaactctactaaataattaataatagtattttcagtaaacaaagaactatgtatacttcgcatcacattagaatacgtatgtttcgcattttgatctgcaacaaattgattgttatgatctagaaagacgtaacgttgatttcctgccatatcactcagtgtaattcgtttgttatatggttcatcaagtatgctaactttacttacaaagaatccttcatattgttgttcaacttgatgtactgcatcatttaatgtttgatgcgtttttacatcactgtcaccaaaaaactcattcttataaatattattttcaacttctggaaagaacaagtaaccaatgcccgaaatggttaaagtgattaacagtggagcaataaatattgctgcatagaaatgtaatctttgtaatggattaaatgtatttttcatatttccctcccaattggctattatacggtgtcaattctgtgatgtgtgtgaacaaactgtgacaatatttattttctagaaaaatttaacgatgatttgtgatttttagaaaaatgaacttttaagttggaatgtttgaagaaaattgattattcgtatgttttatcaagcagctatgataaaatttaaacataatacaatgcgagccatttaacgatctatgtttaaatggacatcgatattgtatgaattcgttgtaacaagcaagcatttctatgtgaacgaaccaaaggggaaagtaacatgattaataaagaacaattagatcttttatataaattaaaaaaagaagttgaaaagtcgcgaaatgaagcacttttacatacaattaaccaagtaattaagaaagtatatttgcagcaatatacatgttcgttcgttggacatttttctgcaggtaaatcgacactgataaatttattaattgaacaagatatcttaccaagttcacctgtaccaacgacaagtaatactgctattgtgtcagtttcagacaatcacgatattattgctaatttgccgaatcaaacgtatgccaaattatctaattatgatgaagtaagggaaatgaatcgccaaaatgtcgacgttgaatctgtagaaattaattttcaatcagctaaatttgaaaatgggtttacgttgcaagatacaccaggtgttgattcaaatgttgcatcacatcagtcaataacagaacaatatatgtatacaagtaatatgatattttatacggttgactataaccacgttcaatctgaacttaactttaagtttatgaagcatataaatgatgttggaatacctgttgtgtttatcattaatcaaattgacaagcatcaagacgatgaattgtcattctctacgtttaaatctcgagttgaaaaatcaattgcagattggggtattaaattagaacgcaccttttatgtatctaaatttgatcaccctgaaaatgaacttgaagtattatcaagttatctaatttcattagatcaacatagagagacaatagaggattatacatcaagaacggttgaatacattaccgaagctcagctagattacattcagtctgaaattcaggaagtactagaagatttaggtatcgaagaagcggagtttgaacaagcatttttaaatagtcaacaacatcaagcaattagtgaagaggcacaacttttaaataatccagatgaattaatggcatttttaaagaataagcgtaaaaatattttagaaaatgcatacattatgccgcataatatgagagaaatgttacgaagttatttggaaagtatgtctcaagactttaatgttggcggattttttaataaaaagaagaaaaaactacaaattcaacaacagcgattattaacagcgacagatgcgttacaagaacatgttaatcaacaaattcgtcaaccaatgcgagaagatatgtcatttgttacgcgttttatcaataaaaaagaagcttcagataaagtattaaatcagcattatgacgttaagccagaaatgattgaaggtttatatcaaccacaaacatcaatcagcaatacttatgtacttacattttcagacgaagtggttaaagccattaagaaatatgttgaacaacaatcaacaccaatttttaaagaaataatagaaaatgtgcaggcagatgaattaccaacagaagaaagtgatgatttaaaagaatatcaacgttatacagaattaaatgagctgcgtcagtcattgacgactaagaattatcgtcactactatattcatttagatgaatctctagataaattaataggtcgacaagagacaacatatcaagtggctactgataatgctcaggataatcgtgataatcagcagctaaatcaaaatacagctacaacaaatatgtctatagatattcaaaaagcgcttgatataatttcggatgtgcctttgttcaagcgtacaaagcaagatatccacgaaacattaacacgtatagataataaattaataaaaataggtgtatttggaacatttagtgctggtaaaagtagtttgataaatgcattattaggcgagcatattttagtcagttctccaaatcctactacagcagctactacagaaatatcttatggagacgagagttatataacgctaaaatcacaatcgcaattattagatgaaattaatgcagtagttgaataccaagatatgtcttattcgactatagaagactttattaattcagatttagaaaagttaaaatcacatttaaataaaaatcaactcgcttttattcaggcagttgaaaaacattataaattgtatgtcaatatgttggaaaatggagaaaaacatgccattaatcaacaggaattgaaaaagtggagtgcagaagatgaatatgcaacatttgttaagacagtacacattgcattaatgcatgattggttaaaaggtaaaataattgttgattcattagggctacactcaaataaccaaaggcatacaaatgaaaccgaacaaattttaacttcttcagacttaatattgtatgtaagttattttaatcattcatttactgataatgacaaagcgtttatagaacacatgaaagatatgaaccagttgaatgaaaaccaagcatttaaaatggtaattaatgctgctgatttagcagaaagtcaagatgatcttgaagcagttgaaacatatgtatcagatgcattaagacaagtacacttacaatcagacatttttgctgtatcaagtcgaaatgcattgcaagctgaagataagggcattgatcaattaaaacaaagcatacaacaatttgttgatgttgaatctaaatcaattttagaacaacaaatgattcatcagcttcaacaaatggatcgttcttatgtagagatgattacagaatttgaaacaaataaagctgatatttcacgtcgccaacaaaggttaacagattataaagataaacagcgtttacaacatcaattaattgatgcgacgttacaacatacagacaacgaagttgaagaacaagtttatcatttaaatgcccgtttaaaactacaactacttgacgatgttaaatcagtgtttaattctcaaatgacgcaaaatagtgattttaatgaagaaaagaaagtgtctacgagagtatacttagatcaaattcatcaacgattgtttttagagcaatctttaattacagaacgtataaaaaaatactttaataagcaactcactgagcaaattgcaccaatcgttcaacaattagcagatttacatgtcattattaatcctcagtttaactttgaatcagctaatatagagcaaccattattgcacatcgatttcaacgatatgctaaatgcattgcctaaacaattaacaaaacgtaaaattttgaatccaaatgggcaaagagatatacatgaatcaatttgtcaaagtacgttaggattattacaaccacaaatgggattattgaggcaacagcttgaattatatgtaaagcaaatggctgtagaagctgaatcgcaatttgaaagttttgaagctaatattcaaacgcaaataaacgatttattagcatttgatttagatacaacacttatcaatcaattgaaagataaacatcaacaactgaaaactattttatattaagaaagaaggaacgttttaaatgcctaataaaatattacttgtagatggtatggcgctattatttagacatttctatgctacaagtcttcataaacaatttatgtacaattcacaaggtgaacctacaaatggaatacaaggatttgtgcgtcatatcttttcggcaatacatgaaatacgccctacacatgtagctgtatgttgggatatgggacaatcaacttttagaaatgatatgtttgatggttataagcaaaatcgttctgcaccaccagaagaattgataccacaatttgattatgttaaagaaatttcagagcaatttggctttgtaaatattggcgttaaaaactatgaagcggatgatgttataggtacattagcacaacaatattcaactgataacgatgtctatattattacgggcgacaaagatttactgcaatgtattaatgacaatgttgaagtttggctaattaaaaaaggttttaacatttataatagatatacattacatcgttttaacgaagaatatgcccttgaaccacaacaactaatcgatattaaagcgtttatgggtgatacagcagatggatatgcgggtgttaaaggtattggcgagaaaacggctattaagttaattcagcaatatcaaagcgttgaaaatgtggttgaaaacattgatgcattatcagctgggcaacgtaataagattaatgacaatttagatgaactatatttatcgaagcgactggctgaaattcacacacaagtaccaattgatagtgaagcgctttttgagaaaatgtcatttgcaacaacgcttaatcatattttatcaatttgtaacgaacatgaattacatgtttcaggaaaatatatttcatcccatttttaaaaagtataagattttatgaaaaattaaaccaattaagtataaaaagactatttctatcgatacaaggtagaaatagtctttttgcgtatttggatatgtcagagtgaataaataagccgaattttgatagatacatatttgattaatcaatagagtataaagaattatatttcatccaaataaattaccatacactacaaaatagtacagttacaactttattaatctcaaaaacatatttgattaattagtttttgagtcaatgtattaatacaactataaatcaaatggagtataagaaataaatatagtggtataattgcacataatatttaagaataagaataatatattaaatatttattaacaaattatagataaaatatgaataattaattaatggtatttacatattcataaccaaaggataaaataattgtgaaattattcacaaatgaaagaggagtgttgcaaatgttagttgcagtagtcaaagaattaaaacaaggtgaaggacgtgtagcttgcacacccgaaaatgtgcgtaagttaacggatgcaggacataaagtaattgttgaaaaaaatgctggcattggttcaggattttctaacgatatgtatgaaaaagaaggcgctaagatcgtaactcacgaacaagcatgggaagctgatcttgttatcaaagtaaaagaacctcatgaaagcgaatatcaatatttcaaaaagaatcaaattatctggggatttttacatctagcatcttcaaaagaaatagtagaaaaaatgcaagaagttggtgtaactgcgattagtggtgaaaccattataaaaaatggaaaagcagaattattagcgccaatgagtgctatagcaggtcaacgctcagcaattatgggagcttactactctgaagcacaacatggtggtcaaggtactttagtgactggtgtacatgaaaatgtggatatacctggtagtacatatgtgattttcggtggtggagtagcagcaacaaatgcagcaaatgttgccttgggactaaatgctaaagtaatcattatcgagttaaacgatgaccgcattaaatatcttgaagatatgtatgcagaaaaagatgtcacagtagtcaaatcaacaccagaaaatttagcagaacaaattaagaaagcagatgtatttatttctacaattttaattccaggtgcgaaaccgccaaaattggttactcgtgagatggttaaatcaatgaaaaaaggttcagtattaatcgatatagctattgaccaaggtggaactattgaaacaattagaccaactacaatttctgatccagtgtatgaagaagaaggtgtgattcattatggtgtaccaaatcaaccaggagcagtcccaagaacttcaacaatggcattagcacaaggaaatattgattatatattagaaatttgtgacaaaggcttagaacaagcaattaaagataatgaagccttaagtactggtgtaaacatttaccaaggacaagtgacaaatcaaggattagcttcatcacatgacctagattataaagaaatattaaatgttatcgaatagatagtaatttaaatgaaattgagtgaaatgaatattttaaatatagcattatagtttggactaaaaatttacaaaacggaaggatgtaattattatgacaaccaacacagttacattacaaacagcacatattgtaagtttaggagatatcgaagaagctaaagcaagcattaaaccatttattcgtcgaacacctctaattaaatcaatgtatttaagccaaagtataactaaagggaatgtatttctaaaattagaaaatatgcaattcacaggatcttttaaatttagaggcgctagcaataaaattaatcacttaacagatgaacaaaaagaaaaaggcattatcgcagcatctgctgggaaccatgcacaaggtgttgctttaacagctaaattattaggcattgatgcaacgattgtaatgcctgaaacagcaccacaagcgaaacaacaagcaacaaaaggctatggggcaaaggttattttaaaaggtaaaaactttaacgaaactagactttatatggaagaattagcgaaagaaaatggcatgacaatcgttcatccatatgacgataagtttgtaatggcaggccaaggaacaattggtttagaaattttagatgatatttggaatgtgaatacagtcatcgtaccagttggcggtggaggattaattgcaggtattgccaccgcattaaaatcatttaacccttcaattcatattatcggtgttcaatctgagaatgttcatggtatggctgagtctttctataagagagatttaactgaacatcgagtggatagcacaatagcagatggttgtgatgtaaaagttcctggtgaacaaacatatgaagtagttaaacatttagtagatgaatttattcttgttactgaagaagaaattgaacatgctatgaaagatttaatgcagcgtgccaaaattattactgaaggtgcaggcgcattaccaacagctgcaattttaagtggaaaaataaacaataaatggcttgaagataaaaatgttgttgcattagtttcaggcgggaatgttgacttaactagagtttcaggtgtcattgaacatggactgaatattgcagatacaagcaagggtgtggtaggttaaaacatttaatcttaaaaatgaggtgtaattatgtcaaatggtaaagaattacaaaaaaatataggtttcttctcagcgtttgctattgttatggggacagttattggttcaggagtattctttaaaatatcaaacgtaacagaagtaacaggaacagcaggaatggccttgtttgtatggttcctaggcggcatcattaccatttgtgcggggttaacagcagcagaacttgctgctgcaatccctgaaacaggtggcttaacgaagtatatagaatatacatacggtgatttctggggcttcctatcaggttgggcgcaatcatttatttattttccagctaacgtagcagcattgtctatcgtatttgcgacacagctaattaatttattccatttatctataggttcgttaataccaatagcaatcgcatctgcgttatctattgtgttgataaatttcctaggttcaaaagcaggcggaattttacaatcagttactttagtaattaaactgattccaatcatcgttattgtaatttttggtatttttcaatctggagatatcactttttcattaattccaactacaggtaattcaggaaatggcttctttacagcaattggtagtggtttattagcaactatgtttgcatatgatggttggattcatgtaggaaatgttgcgggggaacttaaaaatcctaaacgcgatttacctttagcgatttcagttggtatcggttgtattatggctgtgtatttattaattaacgctacattcttattaacgttgccaatagaactacttgctggtaatttaaatgcagcttcagatacatcaaaaatattatttggtgaaaatggcggtaagattattacaatcggtatattaatttctgtttatggtacgatcaatggctatactatgactggtatgcgcgtaccatatgcaatggctgaaagaaaattattgccatttagccatttattcgcaaaattaacaaaatctggcgcaccatggtttggcgcaattatacaacttataatcgctatcatcatgatgtcaatgggagcatttgatacaattacaaatatgttaatctttgttatttggttgttctattgtatgtcatttgttgcggtaataattttaagaaaacgtgaaccaaatatggaacgaccatataaagtaccgttatatccgatcatacctttaattgctattttggcaggatcatttgtattaattaatacactgtttacacaatttatattagcaatcattggaattctaataacagcacttggtataccagtttattactataaaaagaaacaaaaagcagcataaggtaagataactagcattgagaataaatggatggactactaataaatttaaagttttacacattaaaatcaaaaaccattcaattattctatggaacagacaaatttctgttatggaatttgtctgtttttcaaaagtatagggaggcaaatagagatggaaaagccgtcaagagaggcatttgaaggcaataataagttgttaataggaattgttctaagtgtaataacgttttggctatttgcacaatcattggttaatgttgtaccaatacttgaagatagtttcaatacagatattggaacggttaatatcgccgttagtataactgctttattttcaggaatgtttgtagtaggagcaggtggtcttgctgataaatatggcagaattaaactcacgaacattggtattatcttaaatatattaggttcattattaatcattatttcaaatattcctttattacttattataggaagattaattcaaggactttcagcagcatgtattatgcctgcaactttgtctattattaagtcatattacattgggaaagatagacaacgcgctttaagttattggtcaattggctcatggggcggctctggtgtttgttcattttttggaggtgcagttgcaacgcttttaggttggcgttggattttcatcctatcaattataatttcattaattgcactgtttcttattaaaggcacacctgaaactaaatctaaatcgatttctctaaataaatttgacattaaaggtctggttcttttagtcattatgctcctcagtttaaatattttaattactaaaggatcagaattaggtgtaacctcacttctttttattactttattagctattgcaattggatcttttagtttatttatagttcttgaaaagcgtgctacaaatcctttaatcgattttaaattatttaaaaataaagcttacacaggtgcaacagcttcaaactttttgttaaatggtgttgcaggaacattaatagtagccaacacatttgttcaaagaggtttaggatattcttcattgcaagcaggaagtttatcaatcacttatttagtaatggtactaattatgattcgtgttggtgaaaagttacttcaaacactcggatgcaagaaaccaatgttaattggaacaggagttcttattgtcggagaatgtctcatttcattaactttcttgccagaaatattctatgtcatttgttgtattataggttatttattctttggtttaggactagggatatatgctacaccatcaacagatacagcaattgcaaatgcaccgttagaaaaagtaggcgttgctgcaggtatctataaaatggcttctgcattaggtggagcatttggcgtcgcattgagtggtgcagtatatgcaatcgtatcaaatatgacaaacatttatacaggtgcaatgattgcattatggttaaatgcaggtatgggaatattatcattcgttatcattttgttacttgtgcctaaacaaaacgaaattatgataattgagaattaaattgaaatcatacaagtcgctacaatattaaacaaaaatataaaccgattcttatgtgtcattattttaaatgaacatagggattggttttttattactcttttacgctactttatttataattattataaattgtcacaaattcaatttaccttacaatatattttgtgttattatattctggagcataaataaattgttcaacacatagttgtaatgtgtttcaatactttttggatagattgcgaaattgtattgaatcgtcatcgttttaaatttttaaatgagaatggaatgagcattacaatacacaagcaatcaaaagtaaatacattcacaacacaacagagacataacaacaagataaggagtgaacaatagctgtgaattatcgtgataaaattcaaaagtttagtattcgtaaatatacagttggtacattttcaactgtcattgcgacattggtatttttaggattcaatacatcacaagcacatgctgctgaaacaaatcaaccagcaagcgtggttaaacagaaacaacaaagtaataatgaacagactgagaatcgagaatctcaagtacaaaattctcaaaattcacaaaatggtcaatcattatctgctactcatgaaaatgagcaaccaaatattagtcaagctaatttagtagatcaaaaagtagcgcaatcatctactactaatgatgaacaaccagcatctcaaaatgtaaatacaaagaaagattcggcaacggctgcgacaacacaaccagataaagaacaaagtaagcataaacaaaacgaaagtcaatctgctaataaaaatggaaacgacaatagagcggctcatgtagaaaatcatgaagcaaatgtagtaacagcttcagattcatctgataatggtaacgtacaacatgaccgaaatgaattacaagcgttttttgatgcaaattatcatgattatcgctttattgaccgtgaaaatgcagattctggcacatttaactatgtaaaaggcatttttgataagattaatacgttattaggcagtaatgatccaataaacaataaagacttgcaacttgcatacaaagaattggaacaagctgttgctttaattcgtacaatgcctcaacgtcaacagactagccgacgttcaaatagaattcaaacgcgttcggttgagtcaagagctgcagagcctagatcagtatcagactatcaaaatgcaaattcatcatattatgttgaaaatgctaatgatggttcgggctatcctgttggtacatatatcaatgcttctagtaaaggggcgccatataatttaccaactacaccatggaatacattgaaggcctctgactcaaaggaaattgctcttatgacagcgaaacaaactggagacgggtaccaatgggttattaagtttaataaaggacatgctccacatcaaaatatgatcttttggtttgcattaccagcagaccaagtgccagtaggaagaactgactttgtaacagttaattcagatggaacaaatgtacaatggagtcatggagcaggagcaggtgcaaataaaccacttcaacaaatgtgggaatatggagtaaatgatcctcatcgttcacatgactttaaaataagaaatagaagtggccaagtaatatatgactggccaactgtccatatttattctttagaagatttatctagagcgagtgattattttagtgaagctggagcgacacctgctactaaagcttttggtagacaaaattttgaatatattaatggtcaaaaacctgctgaatcaccgggtgttcctaaagtttatactttcatcggtcaaggtgatgcaagttatacaatttcatttaaaacacaaggtccaactgttaataaattgtactatgcagcaggtgggcgtgctttagagtacaatcaattatttatgtacagtcaactatacgtcgaatcaacgcaagaccatcaacaacgtcttaatggtttaagacaagtggttaatcgtacatatcgcataggtacaactaaacgtgtagaagtgagtcaaggaaatgtacaaacgaaaaaggtattagaaagtacaaacctaaatatagatgattttgttgatgatcctttaagttatgttaagacgccgagtaataaagtgttaggattttattcgaataatgcaaatactaatgcttttagaccgggtggagcccaacaattaaatgaatatcaattaagtcaattatttactgatcaaaaattacaagaagcagcaagaactagaaacccaataagattaatgattggtttcgactatcctgatgcttatggtaatagtgaaactttagttcctgttaacttaacggtattacctgaaatccaacataatattaaattctttaaaaatgacgatactcaaaatattgctgaaaaaccattttcaaaacaagctgggcatccagttttctatgtatatgcaggtaaccaagggaatgcttccgtgaatttaggtggtagcgtaacatctattcaaccattacgtattaatttaacaagtaatgagaattttacagataaagattggcaaattacaggtattccgcgtacattacacattgaaaactcgacaaatagacctaataatgccagagaacgcaatattgaacttgttggtaacttattaccaggggattactttggaacgatacgttttggacgtaaagaacaattattcgaaattcgtgttaaaccacatacaccaacaattacaacgacagctgagcaattaagaggtacagcattacaaaaagtgcctgttaatatttcgggaataccgttggatccatcggcattggtttatttagttgcaccaacaaatcaaactacgaatggtggtagtgaggcagatcaaataccatctggttatacgatacttgcgactggtacacctgatggggtgcataatacaattactatacgaccgcaagattatattgtattcataccacctgtaggtaaacaaattagagcagtagtttattataataaagtagttgcatctaatatgagtaatgctgttactattttgccagatgacattccaccaacaatcaataatcctgttggaataaatgccaaatactatcgaggcgacgaagtcaactttacaatgggtgtctctgatagacattctggtataaaaaatacaactattacgacattgccgaatggttggacatcaaatttaacaaaagcggataagaataatggctcattatctattacaggtagagtgagtatgaatcaggcatttaacagtgatattacatttaaagtgtcagcgacagacaatgtcaataatacgacaaatgatagtcaatctaaacatgtttcaattcatgtaggtaaaattagtgaagatgctcatccgattgtattaggaaatactgagaaagttgtagtagtcaatccgactgctgtatctaatgatgaaaagcaaagcataattactgcctttatgaataaaaaccaaaatataagaggatatttagcatcaactgatccagtaactgtcgataataatggtaatgtcacattacattaccgtgatagctcatcgacaacgcttgatgctacaaatgtgatgacatacgaaccagttgtgaaacctgaataccaaactgtcaatgctgctaaaacagcaacggtaacgattgctaaaggacaatcatttagtattggtgatattaaacaatattttactttaagtaatggacaacctattccaagtggcacatttacaaatattacatctgatagaactattccaactgcacaagaagttagtcaaatgaacgcaggcacgcagttataccatataactgctacaaatgcgtatcataaagatagtgaagacttctatattagtttgaaaatcatcgatgtgaaacaaccagaaggcgatcaacgtgtatatcgtacatcaacatatgatttaactactgatgaaatctcaaaagtaaaacaagcatttattaatgcaaatagagatgtaattacgcttgccgaaggtgatatttcagttacaaatacacctaatggtgctaatgtaagtactattacagtaaatattaataaaggtcgattaacgaaatcattcgcgtcaaacctagctaatatgaatttcttgcgttgggttaatttcccacaagattatacagtgacatggacgaatgcaaaaattgcaaacagaccaacagatggtggtttatcatggtctgatgaccataaatctttaatttatcgttatgatgctacattaggtactcaaattacgacgaatgatattttaacaatgttaaaagcaacaactacagtgcctggattgcgaaataacattactggtaatgaaaaatcacaagcagaagctggcggaagacctaactttagaacgactggttattcacaatcaaatgcgacaactgatggtcaacgtcaatttacgttgaatggtcaagtgattcaagtgttagacatcatcaacccttcaaacggttatggtgggcaacctgttacaaattcaaatactcgtgcaaaccatagtaactcaactgttgttaacgtaaacgaaccggcagctaatggtgctggcgcatttacaattgaccacgttgtaaaaagtaattctacacataatgcaagtgatgcagtttataaagcacagttatacttaacgccatatggtccaaaacaatatgttgaacatttaaatcaaaatacaggaaatactactgacgctattaacatttattttgtaccaagtgacttagtgaatccaacaatttcagtaggtaattacactaatcatcaagtgttctcaggtgaaacatttacaaatactattacagcgaatgataactttggtgtgcaatctgtaactgtaccaaatacatcacaaattacaggtactgttgataataaccatcaacatgtttctgcaacggcaccaaatgtgacatcagcaactaataagacaatcaatttattagcaactgatacaagcggcaatacagctacaacttcgttcaatgtaacagtgaaacctttgcgtgataaatatcgagttggtacttcatcaacggctgctaatcctgtgagaattgccaatatttcgaataatgcgacagtatcacaagctgatcaaacgacaattattaattcgttaacgtttactgaaacagtaccaaatagaagttatgcaagagcaagtgcgaatgaaatcactagtaaaacagttagtaatgtcagtcgtactggaaataatgccaatgtcacagtaactgttacttatcaagatggaacaacatcaacagtgactgtacctgtaaagcatgtcattccagaaatcgttgcacattcgcattacactgtacaaggccaagacttcccagcaggtaatggttctagtgcatcagattactttaagttatctaatggtagtgacattgcagatgcaactattacatgggtaagtggacaagcgccaaataaagataatacacgtattggtgaagatataactgtaactgcacatatcttaattgatggcgaaacaacgccgattacgaaaacagcaacatataaagtagtaagaactgtaccgaaacatgtctttgaaacagccagaggtgttttatacccaggtgtttcagatatgtatgatgcgaaacaatatgttaagccagtaaataattcttggtcgacaaatgcgcaacatatgaatttccaatttgttggaacatatggtcctaacaaagatgttgtaggcatatctactcgtcttattagagtgacatatgataatagacaaacagaagatttaactattttatctaaagttaaacctgacccacctagaattgacgcaaactctgtgacatataaagcaggtcttacaaaccaagaaattaaagttaataacgtattaaataactcgtcagtaaaattatttaaagcagataatacaccattaaatgtcacaaatattactcatggtagcggttttagttcggttgtgacagtaagtgacgcgttaccaaatggcggaattaaagcaaaatcttcaatttcaatgaacaatgtgacgtatacgacgcaagacgaacatggtcaagttgttacagtaacaagaaatgaatctgttgattcaaatgacagtgcaacagtaacagtgacaccacaattacaagcaactactgaaggcgctgtatttattaaaggtggcgacggttttgatttcggacacgtagaaagatttattcaaaacccgccacatggggcaacggttgcatggcatgatagtccagatacatggaagaatacagtcggtaacactcataaaactgcggttgtaacattacctaatggtcaaggtacgcgtaatgttgaagttccagtcaaagtttatccagttgctaatgcaaaggcgccatcacgtgatgtgaaaggtcaaaatttgactaatggaacggatgcgatgaactacattacatttgatccaaatacaaacacaaatggtatcactgcagcatgggcaaatagacaacaaccaaataaccaacaagcaggcgtgcaacatttaaatgtcgatgtcacatatccaggtatttcagctgctaaacgagttcctgttactgttaatgtatatcaatttgaattccctcaaactacttatacgacaacggttggaggcactttagcaagtggtacgcaagcatcaggatatgcacatatgcaaaatgctactggtttaccaacagatggatttacgtataaatggaatcgtgatactacaggtacaaatgacgcaaactggtcagctatgaataaaccgaatgtggctaaagtcgttaacgcaaaatatgacgtcatctataacggacatacttttgcaacatctttaccagcgaaatttgtagtaaaagatgtgcaaccagcgaaaccaactgtgactgaaacagcggcaggagcgattacaattgcacctggagcaaaccaaacagtgaatacacatgccggtaacgtaacgacatacgctgataaattagttattaaacgtaatggtaacgttgtgacgacatttacacgtcgcaataatacgagtccatgggtgaaagaagcatctgcagcaactgtagcaggtattgctggaactaataatggtattactgttgcagcaggtactttcaaccctgctgatacaattcaagttgttgcaacgcaaggaagcggagagacagtgagtgatgagcaacgtagtgatgatttcacagttgtcgcaccacaaccgaaccaagcgactactaagatttggcaaaatggtcatattgatatcacgcctaataatccatcaggacatttaattaatccaactcaagcaatggatattgcttacactgaaaaagtgggtaatggtgcagaacatagtaagacaattaatgttgttcgtggtcaaaataatcaatggacaattgcgaataagcctgactatgtaacgttagatgcacaaactggtaaagtgacgttcaatgccaatactataaaaccaaattcatcaatcacaattactccgaaagcaggtacaggtcactcagtaagtagtaatccaagtacattaactgcaccggcagctcatactgtcaacacaactgaaattgtgaaagattatggttcaaatgtaacagcagctgaaattaacaatgcagttcaagttgctaataaacgtactgcaacgattaaaaatggcacagcaatgcctactaatttagctggtggtagcacaacgacgattcctgtgacagtaacttacaatgatggtagtactgaagaagtacaagagtccattttcacaaaagcggataaacgtgagttaatcacagctaaaaatcatttagatgatccagtaagcactgaaggtaaaaagccaggtacaattacgcagtacaataatgcaatgcataatgcgcaacaacaaatcaatactgcgaaaacagaagcacaacaagtgattaataatgagcgtgcaacaccacaacaagtttctgacgcactaactaaagttcgtgcagcacaaactaagattgatcaagctaaagcattacttcaaaataaagaagataatagccaattagtaacgtctaaaaataacttacaaagttctgtgaaccaagtaccatcaactgctggtatgacgcaacaaagtattgataactataatgcgaagaagcgtgaagcagaaactgaaataactgcagctcaacgtgttattgacaatggcgatgcaactgcacaacaaatttcagatgaaaaacatcgtgtcgataacgcattaacagcattaaaccaagcgaaacatgatttaactgcagatacacatgccttagagcaagcagtgcaacaattgaatcgcacaggtacaacgactggtaagaagccggcaagtattactgcttacaataattcgattcgtgcacttcaaagtgacttaacaagtgctaaaaatagcgctaatgctattattcaaaagccaataagaacagtacaagaagtgcaatctgcgttaacaaatgtaaatcgtgtcaatgagcgattaacgcaagcaattaatcaattagtacctttagctgataatagtgctttaaaaactgctaagacgaaacttgatgaagaaatcaataaatcagtaactactgatggtatgacacaatcatcaatccaagcatatgaaaatgctaaacgtgcgggtcaaacagaatcaacaaatgcacaaaatgttattaacaatggtgatgcgactgaccaacaaattgccgcagaaaaaacaaaagtagaagaaaaatataatagcttaaaacaagcaattgctggattaactccagacttggcaccattacaaactgcaaaaactcagttgcaaaatgatattgatcagccaacgagtacgactggtatgacaagcgcatctattgcagcatttaatgaaaaactttcagcagctagaactaaaattcaagaaattgatcgtgtattagcctcacatccagatgttgcgacaatacgtcaaaacgtgacagcagcgaatgccgctaaatcagcacttgatcaagcacgtaatggcttaacagtcgataaagcgcctttagaaaatgcgaaaaatcaactacaacatagtattgacacgcaaacaagtacaactggtatgacacaagactctataaatgcatacaatgcgaagttaacagctgcacgtaataagattcaacaaatcaatcaagtattagcaggttcaccgactgtagaacaaattaatacaaatacgtctacagcaaatcaagctaaatctgatttagatcatgcacgtcaagctttaacaccagataaagcgccgcttcaaactgcgaaaacgcaattagaacaaagcattaatcaaccaacggatacaacaggtatgacgaccgcttcgttaaatgcgtacaaccaaaaattacaagcagcgcgtcaaaagttaactgaaattaatcaagtgttgaatggcaacccaactgtccaaaatatcaatgataaagtgacagaggcaaaccaagctaaggatcaattaaatacagcacgtcaaggtttaacattagatagacagccagcgttaacaacattacatggtgcatctaacttaaaccaagcacaacaaaataatttcacgcaacaaattaatgctgctcaaaatcatgctgcgcttgaaacaattaagtctaacattacggctttaaatactgcgatgacgaaattaaaagacagtgttgcggataataatacaattaaatcagatcaaaattacactgacgcaacaccagctaataaacaagcgtatgataatgcagttaatgcggctaaaggtgtcattggagaaacgactaatccaacgatggatgttaacacagtgaaccaaaaagcagcatctgttaaatcgacgaaagatgctttagatggtcaacaaaacttacaacgtgcgaaaacagaagcaacaaatgcgattacgcatgcaagtgatttaaaccaagcacaaaagaatgcattaacacaacaagtgaatagtgcacaaaacgtgcaagcagtaaatgatattaaacaaacgactcaaagcttaaatactgctatgacaggtttaaaacgtggcgttgctaatcataaccaagtcgtacaaagtgataattatgtcaacgcagatactaataagaaaaatgattacaacaatgcatacaaccatgcgaatgacattattaatggtaatgcacaacatccagttataacaccaagtgatgttaacaatgctttatcaaatgtcacaagtaaagaacatgcattgaatggtgaagctaagttaaatgcttcgaaacaagaagcgaatactgcattaggtcatttaaacaatttaaataatgcacaacgtcaaaacttacaatcgcaaattaatggtgcgcatcaaattgatgcagttaatacaattaagcaaaatgcaacaaacttgaatagtgcaatgggtaacttaagacaagctgttgcagataaagatcaagtgaaacgtacagaagattatgcggatgcagatacagctaaacaaaatgcatataacagtgcagtttcaagtgccgaaacaatcattaatcaaacaacaaatccaacgatgtctgttgatgatgttaatcgtgcaacttcagctgttacttctaataaaaatgcattaaatggttatgaaaaattagcacaatctaaaacagatgctgcaagagcaattgatgcattaccacatttaaataatgcacaaaaagcagatgttaaatctaaaattaatgctgcatcaaatattgctggcgtaaatactgttaaacaacaaggtacagatttaaatacagcgatgggtaacttgcaaggtgcaatcaatgatgaacaaacgacgcttaatagtcaaaactatcaagatgcgacacctagtaagaaaacagcatacacaaatgcggtacaagctgcgaaagatattttaaataaatcaaatggtcaaaataaaacgaaagatcaagttactgaagcgatgaatcaagtgaattctgctaaaaataacttagatggtacgcgtttattagatcaagcgaagcaaacagcaaaacagcagttaaataatatgacgcatttaacaactgcacaaaaaacgaatttaacaaaccaaattaatagtggtactactgtcgctggtgttcaaacggttcaatcaaatgccaatacattagatcaagccatgaatacgttaagacaaagtattgccaacaaagatgcgactaaagcaagtgaagattacgtagatgctaataatgataagcaaacagcatataacaacgcagtagctgctgctgaaacgattattaatgctaatagtaatccagaaatgaatccaagtacgattacacaaaaagcagagcaagtgaatagttctaaaacggcacttaacggtgatgaaaacttagctgctgcaaaacaaaatgcgaaaacgtacttaaacacattgacaagtattacagatgctcaaaagaacaatttgattagtcaaattactagtgcgacaagagtgagtggtgttgatactgtaaaacaaaatgcgcaacatctagaccaagctatggctagcttacagaatggtattaacaacgaatctcaagtgaaatcatctgagaaatatcgtgatgctgatacaaataaacaacaagagtatgataatgctattactgcagcgaaagcgattttaaataaatcgacaggtccaaacactgcgcaaaatgcagttgaagcagcattacaacgtgttaataatgcgaaagatgcattgaatggtgatgcaaaattaattgcagctcaaaacgcagcgaaacaacatttaggtactttaacgcatatcactacagctcaacgtaatgatttaacaaatcaaatttcacaagctacaaacttagctggtgttgaatctgttaaacaaaatgcgaatagtttagatggtgctatgggtaacttacaaacggctatcaacgataagtcaggaacattagcgagccaaaacttcttggatgctgatgagcaaaaacgtaatgcatacaatcaagctgtatcagcagccgaaaccattttaaataaacaaactggaccgaatacagcgaaaacagcagtcgaacaagcacttaataatgttaataatgcgaaacatgcattaaatggtacgcaaaacttaaacaatgcgaaacaagcagcgattacagcaatcaatggcgcatctgatttaaatcaaaaacaaaaagatgcattaaaagcacaagctaatggtgctcaacgcgtatctaatgcacaagatgtacagcacaatgcgactgaactgaacacggcaatgggcacattaaaacatgccatcgcagataagacgaatacgttagcaagcagtaaatatgttaatgccgatagcactaaacaaaatgcttacacaactaaagttaccaatgctgagcatattattagcggtacgccaacggttgttacgacaccttcagaagtaacagctgcagctaatcaagtaaacagcgcgaaacaagaattaaatggtgacgaaagattacgtgaagcaaaacaaaacgccaatactgctattgatgcattaacacaattaaatacacctcaaaaagctaaattaaaagaacaagtgggacaagccaatagattagaagacgtacaaactgttcaaacaaatggacaagcattgaacaatgcaatgaaaggcttaagagatagtattgctaacgaaacaacagtcaaaacaagtcaaaactatacagacgcaagtccgaataaccaatcaacatataatagcgctgtgtcaaatgcgaaaggtatcattaatcaaactaacaatccgactatggatactagtgcgattacccaagctacaacacaagtgaataatgctaaaaatggtttaaacggtgctgaaaacttaagaaatgcacaaaacactgctaagcaaaacttaaatacattatcacacttaacaaataaccaaaaatctgccatctcatcacaaattgatcgtgcaggtcatgtgagtgaggtaactgctactaaaaatgcagcaactgagttgaatacgcaaatgggtaacttggaacaagctatccatgatcaaaacacagttaaacaaagtgttaaatttactgatgcagataaagctaaacgtgatgcgtatacaaatgcggtaagcagagctgaagcaattctgaataaaacgcaaggtgcaaatacgtctaaacaagatgttgaagcggctattcaaaatgtttcaagtgctaaaaatgcattgaatggtgatcaaaacgttacaaatgcgaagaatgcagctaaaaatgcattaaataacttaacgtcaattaataatgcacaaaaacgtgacttaacaactaaaattgatcaagcaacaactgtagctggtgttgaagctgtatctaatacgagtacacaattgaatacagcgatggctaacttgcaaaatggtattaatgataaaacaaatacactagcaagtgaaaactatcatgatgctgattcagataagaaaactgcttatactcaagccgttacgaacgcagaaaatattttaaataaaaatagtggatcaaatttagacaaaactgccgttgaaaacgcgttgtcacaagttgctaatgcgaaaggtgccctaaatggtaaccataatttagagcaagctaaatcaaatgcaaacactactataaacggacttcaacatttaacaactgctcaaaaagataaattgaaacaacaagtgcaacaagcacaaaatgttgcaggtgtagatactgttaaatcaagtgccaacacattaaatggtgctatgggtacgttaagaaatagcatacaagataacacagctacgaaaaatggccaaaactatcttgatgctacagaacgtaacaaaacaaactataacaatgctgttgatagtgctaatggtgtcattaatgcaacaagcaatccaaatatggatgctaatgcaattaaccaaatcgctacacaagtgacatcaacgaaaaatgcattagatggtacacataatttaacgcaagcgaaacaaacagcaacaaatgccatcgatggtgctactaacttaaataaagcgcaaaaagatgcgttaaaagcacaagttacaagtgcgcaacgtgttgcaaatgtaacaagtatccaacaaactgcaaatgaacttaatacagctatgggtcaattacaacatggtattgatgatgaaaatgcaacaaaacaaactcaaaaatatcgtgacgctgaacaaagtaagaaaactgcttatgatcaagctgtagctgctgcgaaagcaattttaaataaacaaacaggttcaaattcagataaagcagcagttgaccgtgcattacaacaagtaacaagtacgaaagatgcattgaatggtgatgcaaaactggcagaagcgaaagcggcagctaaacaaaacttaggcactttaaaccatattacgaatgcacaacgtactgacttagaaggccaaatcaatcaagcgacgactgttgatggcgttaatactgtaaaaacaaatgccaatacattagacggcgcaatgaatagcttacaaggttcaatcaatgataaagatgcgacattaagaaatcaaaattatcttgatgcggatgaatcaaaacgaaatgcatatacgcaagctgtcacagcggctgaaggcattttaaataaacaaactggtggtaacacatctaaagcagacgttgataatgcattaaatgcagttacaagagcgaaagcggctttaaatggtgctgacaacttaagaaatgcgaaaacttcagcaacaaatacgattgatggtttacctaacttaacacaattacaaaaagacaacttgaagcatcaagttgaacaagcgcaaaatgtagcaggtgtaaatggtgttaaagataaaggtaatacgttaaatactgccatgggtgcattacgtacaagtatccaaaatgataatacgacgaaaacaagtcaaaattatcttgatgcatctgacagcaacaaaaataattacaatactgctgtaaataatgcaaatggtgttattaatgcaacgaacaatccaaatatggatgctaatgcgattaatggcatggcaaatcaagtcaatacaacaaaagcagcgttaaatggtgcacaaaacttagctcaagctaaaacaaatgcgacgaacacaattaacaacgcacatgacttaaaccaaaaacaaaaagatgcattaaaaacacaagttaacaatgcacaacgtgtatctgatgcaaataacgttcaacacactgcaactgaattgaacagtgcgatgacagcacttaaagcagctattgctgataaagaaagaacaaaagcaagcggtaattatgtcaatgctgatcaagaaaaacgtcaagcgtatgattcaaaagtgactaacgctgaaaatatcattagtggtacaccgaatgcgacattaacagtcaatgacgtaaatagtgcggcatcacaagtcaatgcggctaaaacagcattaaatggtgataacaacttacgtgtagcgaaagagcatgccaacaatacaattgacggcttagcacaattgaataatgcacaaaaagcaaaattaaaagaacaagttcaaagtgcaactacattagatggtgttcaaactgttaaaaatagttctcaaacgttgaatacagcgatgaaaggcttaagagatagtattgcgaatgaagcaacaattaaagcaggtcaaaactacactgacgcaagtccaaataatcgtaacgagtacgacagtgcagttactgcagcaaaagcaatcattaatcaaacatcgaacccaacgatggaaccaaatactattacgcaagtaacatcacaagtgacaactaaagaacaggcattaaatggtgcgcgaaacttagctcaagctaagacaactgcgaaaaacaacttgaataacttaacatcaattaacaatgcacaaaaagatgcgttaacgcgtagcattgatggtgcaacaacagtagctggtgtaaatcaagaaactgcaaaagcaacagaattaaataacgcaatgcatagtttacaaaatggtatcaatgatgagacacaaacaaaacaaactcagaaatacctagatgcagagccaagtaagaaatcagcttatgatcaagcagtaaatgcagcgaaagcaattttaacaaaagctagtggtcaaaatgtagacaaagcagcagttgaacaagcattgcaaaatgtgaacagtacgaagacggcgttgaacggtgatgcgaaattaaatgaagctaaagcagctgcgaaacaaacgttaggtacattaacacacattaataatgcacaacgtacagcgttagacaatgaaattacacaagcaacaaatgttgaaggtgttaatacagttaaagccaaagcgcaacaattagatggtgctatgggtcaattagaaacatcaattcgtgataaagacacgacgttacaaagtcaaaattatcaagatgctgatgatgctaaacgaactgcttattctcaagcagtaaatgcagcagcaactattttaaataaaacagctggcggtaatacacctaaagcagatgttgaaagagcaatgcaagctgttacacaagcaaatactgcattaaacggtattcaaaacttagatcgtgcgaaacaggctgctaacacagcgattacaaatgcttcggacttaaatacaaaacaaaaagaagcattaaaagcacaagtaacaagtgcaggacgtgtatctgcagcaaatggtgttgaacatactgcgactgaattaaatactgcgatgacagctttaaagcgtgccattgctgataaagctgagacaaaagctagtggtaactatgtcaatgctgatgcgaataaacgtcaagcatatgatgaaaaagttacagctgccgaaaatatcgttagtggtacaccaacaccaacgttaacaccagcagatgttacaaatgcagcaacgcaagtaacgaatgctaagacgcagttaaacggtaatcataatttagaagtagcgaaacaaaatgctaacactgcaattgatggtttaacttctttaaatggtccgcaaaaagcaaaacttaaagaacaagtgggtcaagcgacgacgttgccaaatgttcaaactgttcgtgataatgcacaaacattaaacactgcaatgaaaggtctacgagatagcattgcgaatgaagcaacgattaaagcaggtcaaaactacacagatgcaagtcaaaacaaacaaactgactacaacagtgcagtcactgcagcaaaagcaatcattggtcaaacaactagtccatcaatgaatgcgcaagaaattaatcaagcgaaagaccaagtgacagctaaacaacaagcgttaaacggtcaagaaaacttaagaactgcgcaaacaaatgcgaagcaacatttgaacggcttaagtgacttaactgacgctcaaaaagatgcagtgaaacgtcaaatcgaaggtgcaacgcatgttaatgaagtaacacaagcacaaaataatgcggatgcattaaatacagctatgacgaacttgaaaaatggtattcaagatcagaatacgattaagcaaggtgttaacttcactgatgccgacgaagcgaaacgtaatgcatatacaaatgcagtgacgcaagctgaacaaattttaaataaagcacaaggtccaaatacttcaaaagacggtgtcgaaactgcgttagaaaatgtacaacgtgctaaaaacgaattgaacggtaatcaaaatgttgcgaacgctaagacaactgcgaaaaatgcattgaataacctaacatcaattaataatgcacaaaaagaagcattgaaatcacaaattgaaggtgcgacaacagttgcaggtgtaaatcaagtgtctacaacggcatctgaattaaatacagcaatgagcaacttacaaaatggtattaatgatgaagcagctacaaaagcagctcagaaatatactgatgcagatagagaaaaacaaactgcatacaatgacgctgtaacagcagctaaaacgttattagataaaacagctggttcaaatgacaataaagcagctgttgaacaagcattacaacgtgtgaatactgctaaaacagcattaaatggtgacgagcgattaaatgaagcgaagaacacagctaaacaacaagtagcgacaatgtcacacttaactgatgctcaaaaagcaaacttaacatcgcaaatcgaaagtggtacgactgttgcaggtgttcaaggtattcaagctaatgccggtactttagatcaagcaatgaatcaattaagacaaagtattgcttctaaagatgcgactaaatcaagcgaagattatcaagacgcgaatgcagatttacaaaatgcatacaatgatgcggtaactaatgctgaaggtattattagtgcaacgaataaccctgaaatgaatcctgatacaattaaccaaaaagcgagccaagtgaacagtgcgaagtctgcattgaacggtgatgaaaaattagcagcagcaaaacaaactgcgaaatcagatatcggtcgtttgacagacttgaacaatgcacaacgaactgcggcaaatgctgaagtggatcaagcaccaaatcttgcagctgtcacagcggctaaaaataaagcaacatcgttaaacacagcgatgggtaatttgaaacatgcacttgctgaaaaggataatacgaaacgtagtgtcaattacacagatgcggatcaaccaaaacaacaagcgtatgatactgcggttacacaagcagaagcaattactaatgctaatggcagcaacgcgaatgaaacacaagttcaagcagcactaaaccaattgaatcaagctaaaaatgacttgaatggtgataataaagttgctcaagcaaaagagtcagcgaaacgtgcattagcttcatatagtaacttgaataatgcgcaatcaactgcagcaactagtcaaattgacaatgcaacgacagtagcaggcgtaactgctgcacaaaatactgctaatgaattaaatacagcaatgggtcaacttcaaaatggtataaatgaccaaaacactgttaaacaacaagtgaactttacagatgctgaccaaggtaagaaagatgcttacacaaatgctgttacgaatgctcaaggtattttagataaagcacacggtcaaaatatgacgaaagcacaagttgaagctgcattaaatcaagtaacgactgctaagaatgctttaaacggtgacgcaaatgtaagacaagcaaaatcagatgcgaaagcaaacttaggtacattaacacacttaaataatgcacaaaaacaagatttaacatcacaaatcgaaggcgcaacaacagtcaacggtgtaaatggtgttaaaacgaaagcacaagacttagatggtgcaatgcaacgattacaatcagctatagcaaataaagatcaaactaaagcgagcgaaaattacatcgacgcagatccaactaagaaaacagcatttgataatgctatcacacaagctgaatcttacttaaataaagatcacggtgcgaataaagataagcaagctgttgaacaagcaattcaaagtgtaacgtctactgaaaatgctttgaacggtgacgcgaacttacaacgcgctaaaactgaagctatacaagctatcgataacttgacacatttgaatacaccacaaaaaacagcattaaaacaacaagtgaacgctgcgcaacgtgtatcaggtgtaactgatctgaaaaatagtgctacatcacttaataatgcgatggatcaattaaaacaagcaattgctgatcatgacacaattgtagctagtggtaattacactaacgcgagtcctgataagcaaggtgcttatactgatgcatataatgctgcgaaaaacattgtaaatggttcgcctaatgtgattacaaatgcagcagatgttacagcagcaacacaacgtgttaataatgctgaaacaggtttaaacggtgatacaaacttagcaactgcgaagcaacaagctaaagatgcattacgtcaaatgacacatttatctgatgcacaaaaacaaagtattactggtcaaattgatagcgcgacacaagtaactggcgttcaaagtgtgaaagacaacgcgacaaatcttgataatgcaatgaatcaacttcgaaatagtattgcgaataaagatgatgtaaaagcgagtcaaccatatgttgatgcagatagagataaacaaaatgcatacaatacagcagttacaaatgctgaaaatatcattaatgcaacgagtcagccgacacttgatccatctgcagtaacacaagcagctaatcaagtgagcactaacaaaactgcgcttaatggtgcacaaaacttagcgaataaaaagcaagaaacgactgctaacatcaaccaattaagtcatttaaataatgctcaaaagcaagatttaaatacgcaagtgacaaatgcaccaaatattagcacagtaaatcaagtgaaaactaaagctgaacaattagatcaagcaatggaacgtttaatcaacggaatccaagacaaagatcaagtgaaacaaagtgttaactttacagatgcagatccagaaaaacaaacagcatacaacaatgcggtaactgctgctgaaaatattattaatcaagcaaatggtacaaatgcgaaccaatcacaagttgaagcagcactttcaactgtaacaactacgaaacaagcgttgaatggtgatagaaaagtaacagatgctaaaaacaatgcaaaccaaacattatctacgttagataacttaaacaatgcacaaaaaggtgctgttactggaaacatcaatcaagcgcacactgtagctgaagtaacgcaagccattcaaaccgctcaggaactgaatacagcgatgggtaacttgaaaaatagcttgaatgataaagacactacacttggcagtcaaaactttgcagatgcagatccagagaagaaaaatgcatacaatgaagcggttcataatgctgaaaatattttaaataaatctacaggtacgaacgtgcctaaagatcaagttgaagcagctatgaatcaagtgaatgctacaaaagcagcgcttaatggtactcaaaaccttgaaaaagctaaacaacacgcaaatacagcaattgacggtttaagccatttaacaaatgcacaaaaagaggcattaaaacaattggtacaacaatcgactactgttgcagaagcacaaggtaatgagcaaaaagcaaacaatgttgatgcagcaatggacaaattacgtcaaagtattgcagataatgcgacaacaaaacaaaaccaaaattatactgatgcaagtcagaataaaaaggatgcgtacaataatgctgtcacaactgcacaaggtattattgatcaaactacaagtccaactttagatccgactgttatcaatcaagctgctggacaagtaagcacaactaaaaatgcattaaatggtaatgaaaacctagaggcagcgaaacaacaagcgtcacaatcattaggttcattagataacttaaataatgcgcaaaaacaaacagttactgatcaaattaatggcgcgcatactgttgatgaagcaaatcaaattaagcaaaatgcgcaaaacttaaatacagcgatgggtaacttgaaacaagcgatagctgacaaagatgctacgaaagcgacagttaacttcactgatgcagatcaagcaaaacaacaagcatataacactgctgttacaaatgctgaaaatatcatttcaaaagctaatggcggcaatgcaacacaagctgaagttgaacaagcaatcaaacaagttaatgctgcaaaacaagcattaaatggtaatgccaacgttcaacatgcaaaagacgaagcaacagcattaattaatagctctaatgaccttaaccaagcacaaaaagacgcattaaaacaacaagttcaaaatgcaactactgtagctggtgtaaacaatgttaaacaaacagcacaagagttaaacaatgctatgacacaattaaaacaaggcattgcagataaagaacaaacaaaagctgatggtaactttgtcaatgcagatcctgataagcaaaatgcatataatcaagcagtagcgaaagctgaagcattaattagtgctacgcctgatgttgtcgttacacctagcgaaattactgcagcgttaaataaagttacgcaagctaaaaatgatttaaatggtaatacaaacttagcaacggcgaaacaaaatgttcaacatgctattgatcaattgccaaacttaaaccaagcgcaacgtgatgaatacagcaaacaaatcacgcaagcaacacttgtaccaaacgtcaatgctattcaacaagcggcgacaacgcttaatgacgcgatgacacaattgaaacaaggtattgcgaataaagcacaaattaaaggtagcgagaactatcacgatgctgatactgacaagcaaacagcatatgataatgcagtaacaaaagcagaagaattgttaaaacaaacaacaaatccaacaatggatccaaatacaattcaacaagcattaactaaagtgaatgacacaaatcaagcacttaacggtaatcaaaaattagctgatgccaaacaagatgctaagacaacacttggtacactagatcatttaaatgatgctcaaaaacaagcgctaacaactcaagttgaacaagcaccagatattgcaacagttaataatgttaagcaaaatgctcaaaatctgaataatgctatgactaacttaaacaatgcattacaagataaaactgagacattaaatagcattaactttactgatgcagatcaagctaagaaagatgcttatactaatgcggtttcacatgcagaaggtattttatctaaagcaaatggcagcaatgcaagtcaaactgaagtggaacaagcgatgcaacgtgtgaacgaagcgaaacaagcattgaatggtaatgacaatgtacaacgtgcaaaagatgcagcgaaacaagtgattacaaatgcaaatgatttaaatcaagcgcaaaaagatgcattaaaacaacaagtcgatgctgcgcaaactgttgcaaatgtaaacacgattaagcaaacagcacaagatttaaatcaagcaatgacacaattgaaacaaggtattgcagataaagaccaaactaaagcaaatggtaactttgtcaatgctgatactgataagcaaaatgcttacaacaatgcggtagcacatgctgaacaaataattagtggtacaccaaatgcaaacgtggatccacaacaagtggctcaagcgttacaacaagtgaatcaagctaagggtgatttaaacggtaaccataacttacaagttgctaaagacaatgcaaatacagccattgatcagttaccaaacttaaatcaaccacaaaaaacagcattaaaagaccaagtgtcgcatgcagaacttgttacaggtgttaatgctattaagcaaaatgctgatgcgttaaataatgcaatgggtacattgaaacaacaaattcaagcgaacagtcaagtaccacagtcagttgactttacacaagcggatcaagacaaacaacaagcatataacaatgcggctaaccaagcgcaacaaatcgcaaatggcataccaacacctgtattgacgcctgatacagtaacacaagcagtgacaactatgaatcaagcgaaagatgcattaaacggtgatgaaaaattagcacaagcgaaacaagaagctttagcaaatcttgatacgttacgcgatttaaatcaaccacaacgtgatgcattacgtaaccaaatcaatcaagcacaagcgttagctacagttgaacaaactaaacaaaatgcacaaaatgtgaatacagcaatgagtaacttgaaacaaggtattgcaaacaaagatactgtcaaagcaagtgagaactatcatgatgctgatgccgataagcaaacagcatatacaaatgcagtgtctcaagcggaaggtattatcaatcaaacgacaaatccaacgcttaacccagatgaaataacacgtgcattaactcaagtgactgatgctaaaaatggcttaaacggtgaagctaaattggcaactgaaaagcaaaatgctaaagatgccgtaagtgggatgacgcatttaaacgatgctcaaaaacaagcattaaaaggtcaaatcgatcaatcgcctgaaattgctacagtgaaccaagttaaacaaacagcaacgagcctagatcaagcaatggatcaattatcacaagctattaatgataaagctcaaacattagcggacggtaattacttaaatgcagatcctgacaaacaaaatgcgtataaacaggcagtagcaaaagctgaagcattattgaataaacaaagtggtactaatgaagtacaagcacaagttgaaagcatcactaatgaagtgaacgcagcgaaacaagcattaaatggtaatgacaatttggcaaatgcaaaacaacaagcaaaacaacaattggcgaacttaacacacttaaatgatgcacaaaaacaatcatttgaaagtcaaattacacaagcaccacttgttacagatgtcactacgattaatcaaaaagcacaaacattagatcatgcgatggaattattaagaaatagtgttgcggataatcaaacgacattagcgtctgaagattatcatgatgcaactgcgcaaagacaaaatgactataaccaagctgtaacagctgctaataatatcattaatcaaactacatcgcctacgatgaatccagatgatgttaatggtgcaacgacacaagtgaataatacgaaagttgcattagatggtgatgaaaaccttgcagcagctaaacaacaagcaaacaacagacttgatcaattagatcatttgaataatgcgcaaaagcaacagttacaatcacaaattacgcaatcatctgatattgctgcagttaatggtcacaaacaaacagcagaatctttaaatactgcgatgggtaacttaattaatgcgattgcagatcatcaagccgttgaacaacgtggtaacttcatcaatgctgatactgataaacaaactgcttataatacagcggtaaatgaagcagcagcaatgattaacaaacaaactggtcaaaatgcgaaccaaacagaagtagaacaagctattactaaagttcaaacaacacttcaagcgttaaatggagaccataatttacaagttgctaaaacaaatgcgacgcaagcaattgatgctttaacaagcttaaatgatcctcaaaaaacagcattaaaagaccaagttacagctgcaactttagtaactgcagttcatcaaattgaacaaaatgcgaatacgcttaaccaagcaatgcatggtttaagacagagcattcaagataacgcagcaactaaagcaaatagcaaatatatcaacgaagatcaaccagagcaacaaaactatgatcaagctgttcaagccgcaaataatattatcaatgaacaaactgcaacattagataataatgcgattaatcaagcagcgacaactgtgaatacaacgaaagcagcattacatggtgatgtgaagttacaaaatgataaagatcatgctaagcaaacggttagtcaattagcacatctaaacaatgcacaaaaacatatggaagatacgttaattgatagtgaaacaactagaacagcagttaagcaagatttgactgaagcacaagcattagatcaacttatggatgcattacaacaaagtattgctgacaaagatgcaacacgtgcgagcagtgcatatgtcaatgcagaaccgaataaaaaacaatcctatgatgaagcagttcaaaatgctgagtctatcattgcaggattaaataatccaactatcaataaaggtaatgtatcaagtgcgactcaagcagtaatatcatctaaaaatgcattagatggtgttgaacgattagctcaagataagcaaactgctggaaattctctaaatcatttagatcaattaacaccagctcaacaacaagcgctagaaaatcaaattaataatgcaacaactcgtggcgaagtagcacaaaaattaactgaagcacaagcacttaaccaagcaatggaagctttacgtaatagcattcaagatcaacagcaaacggaagcgggtagcaagtttatcaatgaagataaaccacaaaaagatgcttaccaagcagcagttcaaaatgcaaaagatttaattaatcaaactaacaatccaacgcttgataaagcacaagttgaacaattgacacaagctgttaaccaagctaaagataacctacacggtgatcaaaaacttgcagacgataaacaacatgcggttactgatttaaatcaattaaatggtttgaataatccgcaacgtcaagcacttgaaagccaaataaacaacgcagcaactcgtggcgaagtagcacaaaaattagctgaagcaaaagcgcttgatcaagcaatgcaagcattacgtaatagtattcaagatcaacaacaaacagaatctggtagcaagtttatcaatgaagataaaccgcaaaaagatgcttaccaagcagcagttcaaaatgcaaaagatttaattaaccaaacaggtaatccaacactcgacaaatcacaagtagaacaattgacacaagcagtaacaactgcaaaagataatctacatggtgatcaaaaacttgctcgtgatcaacaacaagcagtaacaactgtaaatgcattgccaaacttaaatcatgcacaacaacaagcattaactgatgctataaatgcagcgcctacaagaacagaggttgcacaacatgttcaaactgctactgaacttgatcacgcgatggaaacattgaaaaataaagttgatcaagtgaatacagataaggctcaaccaaattacactgaagcgtcaactgataaaaaagaagcagtagatcaagcgttacaagctgcagaaagcattacagatccaactaatggttcaaatgcgaataaagacgctgtagaccaagtattaactaagcttcaagaaaaagaaaatgagttaaatggtaatgagagagtcgctgaagctaaaacacaagcgaaacaaactattgaccaattaacacatttaaatgctgatcaaattgcaactgctaaacaaaacattgatcaagcgacgaaacttcaaccaattgctgaattagtagatcaagcaacgcaattgaatcaatctatggatcaattacaacaagcagttaatgaacatgctaacgttgagcaaactgtagattacacacaagcagattcagataaacaaaatgcttataaacaagctattgctgatgctgaaaatgtattgaaacaaaatgcgaataagcaacaagtggatcaagcacttcaaaatattttaaatgcaaaacaagcattaaatggtgatgaacgtgtagcacttgctaaaacaaatggtaaacatgacatcgaccaattgaatgcattaaacaatgctcaacaagatggatttaaaggtcgcatcgatcaatcaaacgatttaaatcaaatccaacaaattgtagatgaggctaaggcacttaatcgtgcaatggatcaattgtcacaagaaatcactgacaatgaaggacgcacgaaaggtagcacgaactatgtcaatgcagatacacaagtcaaacaagtatatgatgaaacggttgataaagcgaaacaagcacttgataaatcgactggtcaaaacttaactgcaaaacaagttatcaaattaaatgatgcagtcactgcagctaagaaagcattaaatggtgaagaaagacttaataatcgtaaagctgaagcattacaaagattggatcaattaacacatctaaacaatgctcaaagacaattagcaatccaacaaattaataatgctgaaacgctaaataaagcatctcgagcaattaatagagcaactaaattagataatgcaatgggtgcagtacaacaatatattgacgaacagcaccttggtgttatcagcagcacaaattacatcaatgcagatgacaatttgaaagcaaattatgataatgcaattgcgaatgcagcacatgagttagataaagtgcaaggtaatgcaattgcaaaagctgaagcagagcaattgaaacaaaatattatcgatgctcaaaatgcattaaatggagaccaaaaccttgcaaatgccaaagataaagcaaatgcgtttgttaattcgttaaatggattaaatcaacagcaacaagatcttgcacataaagcaattaacaatgccgatactgtatcagatgtaacagatattgttaataatcaaattgacttaaatgatgcaatggaaacattgaaacatttagttgacaatgaaattccaaatgcagagcaaactgtcaattaccaaaacgctgacgataatgctaaaacaaacttcgatgatgccaaacgtctagcaaatacattgctaaatagtgataacacaaatgtgaatgatatcaatggcgcaatccaagcagtcaatgatgcaatccataatcttaatggtgatcaacgactacaagatgctaaagacaaggcaattcaatctattaatcaagctttagctaataagctaaaagaaatcgaagcttcaaatgcgacggatcaagacaagcttattgcgaaaaataaagcagaagaattggcaaacagcatcatcaacaacattaataaagcaacaagtaatcaggctgtatctcaagttcaaacagcaggcaaccacgcgattgaacaagtgcatgccaatgaaataccaaaagcaaaaattgatgccaataaagacgttgataagcaagttcaagcattaattgacgaaattgatcgaaatccaaatctaacagataaggaaaaacaagcacttaaagatcgtattaatcaaatacttcaacaaggtcataacggcattaacaatgcgatgactaaagaagaaattgaacaagccaaagcacaacttgcgcaagcattacaagacatcaaagatttagtgaaagctaaagaagatgcgaaacaagatgttgataaacaagttcaagctttaattgacgaaatcgatcaaaatccaaatctaacagataaggaaaaacaagcacttaaagatcgaattaatcaaatacttcaacaaggtcataacgacattaacaatgcgctgactaaagaagaaattgagcaggcaaaagcacaacttgcacaagcattgcaagacatcaaagatttagtgaaagctaaagaagatgcgaaaaatgcaataaaagccttagctaatgcgaagcgtgatcaaatcaattcaaatccagatttaacacctgagcaaaaagcaaaagcgctcaaagaaattgacgaagctgaaaaacgagcactacaaaacgttgagaatgctcaaactatagatcaattaaatcgaggattaaacttaggtttagatgacattagaaatacacatgtatgggaggttgatgaacaacctgctgtaaatgaaatttttgaagcaacacctgagcaaatcctagttaatggtgaactcattgtacatcgtgatgacatcattacagaacaagatattcttgcacacataaacttaattgatcagctttcagcagaagtcatcgatacaccatcaactgcaacgatttctgatagcttaacagcaaaagttgaagttacattgcttgatggatcaaaagtgattgttaatgttcctgtaaaagttgtagaaaaagaattgtcagtagtcaaacaacaggcaattgaatcaatcgaaaatgcggcacaacaaaagattaatgaaatcaataatagtgtgacattaacactggaacaaaaagaagctgcaattgcagaagttaataagcttaaacaacaagcaattgatcatgttaacaatgcacctgatgttcattcagttgaagaaattcaacaacaagaacaagcgcatattgaacaatttaatccagaacaatttacgattgaacaagcaaaatcaaatgcaattaaatcgattgaagatgcaattcaacatatgattgatgaaatcaaagctcgtactgatctaacagataaagagaagcaagaagctattgctaagttaaatcaattaaaagaacaagcaattcaagcgattcaacgtgcgcaaagcatcgatgaaataagtgagcaattggaacaatttaaagctcaaatgaaagcagctaatccaacagcaaaagaactagctaaacgcaagcaagaagctattagtagaattaaagacttttcaaatgaaaaaataaatagtattcgaaatagtgaaattggcacagctgatgaaaaacaagcagcaatgaatcaaattaacgaaattgtgcttgaaacaattagagatattaataatgcgcatacattacagcaagttgaggctgcattgaacaatggtattgctcgaatttcagcagtacaaattgtaacatctgatcgtgctaaacaatcgtcaagtactggaaatgaatctaatagccatttaacaattggttatggaactgcaaatcatccatttaacagttcgactattggacataaaaagaaacttgatgaagatgatgacattgatccacttcatatgcgtcactttagtaataatttcggtaatgttattaaaaacgctattggtgtggtgggtatctctggtttactagctagtttctggttcttcattgccaaacgtcgtcgtaaagaagatgaagaggaagaattagaaataagagataataataaagattcaataaaagagactttagacgatacaaaacatttaccacttttatttgcgaaacgtcgcagaaaagaagatgaagaagatgttactgttgaagaaaaagattcgctaaataatggcgagtcactcgataaagttaaacatacgccgttcttcttaccaaaacgtcgtcgtaaagaagatgaagaagatgtggaagttacaaatgaaaacacagatgaaaaagtattgaaagataacgaacattcaccactcttattcgcaaaacgacgcaaagataaagaggaagatgttgaaacaacaactagtattgaatctaaagatgaggacgttcctttattattggctaaaaagaaaaatcaaaaagataaccaatccaaagacaaaaagtcagcatcaaaaaatacttctaaaaaggtagcagctaaaaagaagaaaaagaaagctaagaaaaataaaaaataatttgtttctttgataaatagaggagcaccgattgacatcacatcagtcggtgctccttttatttattctttttaattaatttatacaatgcctgttgagcgtgttgattcgcttctttgttttgttctctcggtatccatttaacaaataataaatcaaaatctttttcaaatatttctatttgatcaaaataaggtttgaaatttgcgtttttcacataaccagcttcaatgctatctgcaattagctttgagtctgtatataatagtgcgttttgaacatttaattcacgtgcatgttctagtgcataaatacatgcagcccattctgcagtgtggttatccatttcgcctaactcatgtgtatatgtataatgctgctcatcttctttgattacaatggcacatgtacttatgcctggatttcctttcgtcgcagcatcaaaatttattttcgccataataaacctactttctattcaatacttagttaaagttactattactgtaatacaaaatatgttgggtaatccattaaaaaacacgcatcacttaaataagtaacacgtgtttaaaatactcgctgattcaaagatgattttctaatacgtagtactgtaatatacttcctaaaaaaatcatcttcaggctgggacataaatcaatgttctatgctctacgatgttatattggcagtagttgactgaacgaaaatgcgcttgtaacaagcttttttcaattctagtcaggggccccaacacagagaatttcgaaaagaaattctacaggcaatgcgagttggggtgtgggtcccaacacagaagatgacgaaaagtcagcttacaataatgtgcaagtttgggatgggccccaacaaagagaaattggattcccaatttctacagacaatgcaagttggggtgggacgacgaaataaattttgcgaaaatattatttctgtcccactcccttaaaacttattcttttgtgtagtaagtgcgttaatagccttgatctaacttatcaatcttacctttacgataaaatgatttagcaatatatccaaatggtacattgaaaactgttgaagctaattttaatacgtacgttgtaataaatatttcaaatacaactgtaccaggtaaacttccgataaatgcgatagctacaaataaagctgtatcaattattgagcttaaaaatgtactaccatatgcacggatgaaaaacgttttatcagaactaaatacttttttaattagtgaaaagataaatacatcaatatgttgaccaataatatatgcgacgattgagcctaaagcaatgcgtggcacaacatcaaagattgcgtgtaatgctttttgtgccatatcttctggtgcaggaataaaatgtaatgacaattgcataacaataatcataattaatgttgatgaaaagcctaaccaaactgctctttttgcaactctacgcccataaatatcgtttaatatatctgttgctaaataaatagaagcaaacatgacattacctaaagttgctgaaataccaaagatttctacagttttaatcacttgtatgttggcaatgattgtgccaattgcaacccatgcaattaaaccttgtttaccaaaaaagcgatacataagtaccataagcacgaacgttgcaataaacgtaactagtcctaaaatttcattatacatattaaaatgtcctcctaaattttgatcatgcgggtgtttagaaaccgctcaataaataactaactcattttactgaaaaatcgtttgcgatgcaatagcattttacacaggagtctggacttgacttttaaaacagtaacacttatttacaaggttgcaatattttgaagtaataaaggaagtgtcgcgtattttaactttttcagagcaaaatgcactcgcgaaaatagatgatttaatgaatacttattgcaatcaatgtccaatcaaaactcgtctgcgtaaattagaggggaaaacgaaggcgcatcatttttgtatcaatgagtgttcaatagggaaagaaataaaacaattaggaaatgaacttcaataggaggaagtcaaatgaaaattatatctatatcagaaacaccgaaccacaatacaatgaagattacacttagtgaaagcagagaaggtatgacatcagatacgtatactaaagttgatgattcacagccagcatttattaatgacatcttaaaggttgaaggcgttaaatcaattttccatgttatggactttatttcagtagataaagaaaatgacgcaaattgggaaacagtattgccaaaagtagaggctgtattcgaataaatttttcatcaactagtattcggggggaataaagtatatggaaattttacgtatagagccaacaccaagtccaaatacaatgaaagttgttttgtcatatacaagagaagacaagttatctaatacttataaaaaagtagaagaaacacaaccaagatttataaatcagttgttatctatagatggtatcacttccatttttcatgtcatgaacttcttagctgttgataaggcaccaaaagctgattgggaagtcatattacctgatattaaagctgctttttctgatgcgaataaggttttagaatctgtaaatgaacctcaaattgacaatcattttggtgaaattaaagctgaattattaacttttaagggtataccgtatcaaattaagctaacttctgctgaccaagaattaagagaacaattaccacaaacatatgttgaccatatgactcaagcgcaaacagcacatgacaatattgtttttatgcgtaaatggctagatttaggaaatcgctatggaaatattcaagaagtaatggatggtgtcctagaagaagtgctagctacctatccagaatcacagttacccgtattggtaaaacatgctttagaagaaaatcacgcaactaataattatcatttctatcgacatgtctctttggatgaatatcatgcaactgataattggaagactcgattacgaatgttaaaccattttccaaagccgacttttgaagatataccgctgcttgatttagctttatctgatgaaaaagtaccggttagacgtcaagcgattgtattattaggtatgattgaaagtaaagaaattttaccgtatttatataaggggcttcgtgataaaagtcctgctgtaagaagaacagcaggggattgcataagcgatttagggtatccagaggcactaccagaaatggtgctactattagatgatccacagaaaatcgttaggtggcgtgctgctatgtttatctttgatgaaggtaatgcagagcagcttcccgcactaaaagcccatattaatgacaatgcgtttgaagttaaattacaaattgaaatggccatatctcgtattgaaaacggagatgaagcacttggttcagtatggaaacaaatggcaaacagaacaatttaattggaggaattaaatatgaatgcatatgatgcttatatgaaagaaattgcgcaacaaatgcgtggcgaattaactcaaaatggttttacaagtttagaaacgagcgaagcagtatcggagtatatgaaccaagtaaatgctgatgacactacttttgtagttattaactctacatgcggctgtgcagctggattagcaagaccagctgcagtagcagttgcaacacaaaatgaacatagacctacaaatacagttacagtttttgctgggcaagataaagaagcaactgctacaatgcgagaattcattcagcaagcaccatctagtccttcgtatgctttattcaaaggtcaagatttagtttattttatgcctagagaatttatcgaaggtagagatattaatgacattgcaatggacttaaaggatgcctttgacgaaaattgtaaatagtacacataaataaatataaaggttaacacattttataatattaaaaatggtgtctgtcattgaaaatagagaatatagttgtattctatttgttaaataaagtccgtttttaccaactatattttctagaaatttaactgttttaataggacatcaaacataatattcaaatcatgtgttaacctcttttttaaaattttttagcattaaagttatagatttgggtaaacaattaccaattggaaacatatatcacgttacgatggggtaggtacttaatcagcattttataaataaagtaacggaattcatgatattaatatcatattcctaaaatgagtgataacaaaatgctacataaagttaagttatatcaaactaaatatacatactataaataatgaaaatgaggtgttatcgcatatgttgaattcatttgatgcagcatatcacagtctttgtgaagaagttttagaaataggaaatacacgaaatgatcgcacaaatacaggtacgatttcgaaatttggtcatcaacttcgctttgacttatctaaaggatttccactattaacgacaaagaaagtttcttttaaattagtagcaaccgaattattatggttcattaaaggagatacaaacatccaatacttattaaaatataataataatatatggaacgaatgggcttttgaaaattatatcaaatcagacgagtataaaggtccagatatgacagatttcgggcatcgtgcattgagtgatcctgaatttaacgaacaatataaagaacaaatgaaacaatttaagcaacgtattcttgaagatgatacatttgcgaagcaattcggggatttaggaaatgtttatggtaaacaatggcgagattgggttgataaagatggtaatcattttgatcaacttaaaacagtaattgaacaaattaagcataatccagattcaaggcgacacatcgtatctgcatggaatccaacagaaattgatacaatggcacttccgccttgtcataccatgttccagttttatgtccaagatggtaagttaagttgccagttataccaacgtagcgcagatatctttttaggtgtgccatttaatatcgcaagctacgctttattgacacaccttattgccaaagaatgtggacttgaagtgggtgaatttgtgcatacatttggagatgcacatatttattcaaatcatattgatgcgattcaaacacaattagcacgtgaaagcttcaatcctccaacattaaaaattaacagtgacaagtctattttcgacataaattatgaagatttggaaattgttgactatgaatcacatccagcaataaaagctccaatagcagtgtagtcattgcatagttagctaaccatatagacatcaaaatgacatcatagtattttcaagtgcaaaaaagtacttttttgtgttaaacgttttcataaattatgcaaaatcattatttctatcacactttatgataaaaattgtgttaaattaaagataacttagtaataaaaaatgaaatgatagaagaaggaggataattatgactttatccattctagttgcacatgacttgcaacgagtaattggttttgaaaatcaattaccttggcacctaccaaatgatttgaagcatgttaaaaaattatcaacaggtcatactttagtaatgggtcgtaagacatttgaatcgattggtaaaccactaccgaatcgtcgaaatgttgtacttacttcagatacaagtttcaacgtagagggcgttgatgtaattcactctattgaagatatttaccaactaccgggccatgttttcatatttggagggcaaacattatatgaagaaatgattgataaagtggacgacatgtatattactgttattgaaggtaaattccgtggtgatacgttctttccaccttatacatttgaagactgggaagttgcctcttcagttgaaggtaaactagatgagaaaaatacaattccacgtacctttctacatttaattcgtaaaaaataagggggaaaacgaccatgacaaaacagattatagtaacagactcaacatccgatttatctaaagaatacttagaagcaaacaacattcatgtaattcctttaagtttaactattgaaggagcttcatacgttgaccaagtagatattacatcagaagaatttattaatcatattgaaaatgatgaagatgtaaagacaagtcagccagccataggtgaatttatatctgcttatgaagaactaggaaaagatggctctgaaatcataagtattcatctttcttcaggattaagtggtacatataacactgcttaccaagcaagtcaaatggtagatgctaatgtaactgttattgattcaaaatctatttcttttggtttagggtatcaaatacaacacctagtagagcttgtaaaagaaggtgtctcaacttctgaaatagttaaaaagttaaatcatttaagagaaaacattaaattatttgtagttatagggcaattgaatcaattaattaaaggtggcagaattagtaaaacaaaaggtttgattggtaatcttatgaaaattaaaccaattggtacactagatgatggtcgcttagagcttgtgcacaatgcgagaactcaaaattctagtatccaatacttgaaaaaggaaattgctgaatttataggagatcatgaaatcaaatccattggtgtcgcacatgctaacgtcattgaatatgttgataaattgaagaaagtttttaatgaagcttttcatgtgaataattacgatataaatgtaactacaccagttatttctgcacatactggtcaaggtgcgattggcctcgtagtccttaagaagtaaatttaatcttttcagtgttaattacttccatttcaatcctttatagactaaatttataattagatagatagaggaggtaattcatatgacaaaagaatatgcaacattagcaggaggatgtttctggtgcatggttaaaccatttacatcatatccaggcatcaggtcagtcgtatctggttatagtggcggtcatgttgacaacccaacttatgaacaggtatgtacgaatcaaaccggccatgtcgaagcagtacaaattacgtttgatccagaggttacttcctttgaaaatatattagacatatatttcaaaacatttgacccaactgatgatcaagggcaatttttcgatagaggcgaaagctatcaaccagtcattttctatcatgatgaacatcagaaaaaggctgctgagtttaaaaagcaacaattaaatgaacaaggtattttcaagaaaccagtgattacacctattaaaccatataaaaatttctatccagctgaagactaccatcaagattattacaaaaagaacccggtacattattaccaatatcaacgtggttcaggtagaaaagcgtttatagaatcacattgggggaatcaaaatgcttaaaaaagataaaagtgaactaacagatatagaatatattgttacacaagaaaacggcactgaaccaccatttatgaatgaatattggaatcattttgctaaaggaatttatgtagataaaatttctggtaaacctttatttacatctgaagaaaagtttcattctgaatgtggatggcctagcttttccaaagcgcttgatgacgatgaaattatagaattagtcgacaaatcatttggtatgttgagaactgaagtgcgttcagaagaatcaaatagtcatttaggacatgtctttaatgatggacctaaagaaagtggcggcttaagatactgtatcaattccgctgcaattcaatttattccatatgaaaagttagaagaattgggttatggcgatttaatatcacattttgataagtaggagtggaaagtatgtttaaaaaattattcggaaaaggcaaagaagttcagaaagatatcgcaatttatgcaccattaactggagaattcgtgaaaattgaagatattccagatcctgtattcgcacaaaaaatgatgggcgaaggttttggtattaatccaactgaaggagaagttgtgtctccaattgcaggacgtgttgacaatgtctttccaactaagcatgcgattgggttaaaagcagataacggattagaattattagttcatatcggtttagacacagttcaattagacggtgaaggatttgaagtgttagtgtctagtggtgacgaagttaacgtcggagatccattagtaagattcaaccttgaatatattaataataacgctaaatctgtaatttcaccaattataattactaacactgatcaagcagcttcaattaatatttatgatgaaaatgctgtgattaaaggtgaaacaaaagtgattgatgtgacaatgaactaatgaaaaactattcgttttatcaatttgtcatgacagttcgtggtcgacacgacgataaaggtcgtctagcagaagagatatttgacgatcttgctttcccaaaacacgatgatgattttaacatactgtctgattatattgagacacatggtgatttcacattgccaatgtctgtatttgatgatttatatgaagaatatacggaatggctaaaattttaatataatttttaataataatagttagaaccagggtgatgcaattcgttatcctggttttaatttaaaataaactaagttgtgactaaaaattaatcaattatagtgaaatatggtgcgctatcttgcataaattgatatgattaactacacagaatttaaaagtacataatacataataaggaagtgatacaatggatgataagcaacacacatcttcatccgatgatgaacgcgctgaaattgcaacaagcaatcaagaccaagaaactaattcatcgaaacgcgttcacttaaaacgttggcaattcatatcaatattaattggtacaatcctaataacagctgtcatcacagttgttgcatatatttttataaatcaaaaaataagtggtttaaacaaaactgatcaagcaaacttaaataaaattgaaaatgtgtataaaatcttaaatagtgattattacaaaaaacaggactctgacaagttaagtaaagctgcaattgatggcatggtcaaagaattaaaagatccttattctgaatatttaacaaaagaacaaacgaaatcctttaatgaaggtgtttcaggtgattttgtaggtattggtgcagaaatgcaaaagaaaaatgatcaaattatggttactagtcctatgaagggatctccagcagaacgtgctggcattcgtcctaaagatgtcattactaaagtaaatggaaaatcaattaaaggtaaagcattagatgaagttgtcaaagatgttcgtggtaaagaaaacactgaagtcactttaactgttcaacgaggtagtgaagaaaaagacgttaagattaaacgtgaaaaaattcatgttaaaagtgttgagtataagaaaaaaggtaaagttggagttattactattaataaattccagaatgatacatcaggtgaattgaaagatgcagttctaaaagctcacaaagatggtttgaaaaagattgttttagatttaagaaataatccaggtggactactagatgaagctgttaaaatggcaaatatttttatcgataaaggaaaaactgttgttaaactagaaaaaggtaaagatactgaagcaattcaaacttctaatgatgcgttaaaagaagcgaaagacatggatatatccatcttagtgaatgaaggttcagctagcgcttctgaagtgtttactggtgcgctaaaagactataataaagctaaagtttatgggtcaaaaacattcggcaaaggtgtcgtacaaactacaagagagtttaaggatggttcattgttaaaatatactgaaatgaaatggttaacgccagatggtcattatattcacggtaaaggcattaaaccagacgttactattgacacacctaaatatcaatctttaaatgtcattcctaatacgaaaacatttaaagttggagacgatgataaaaatattaaaactattaaaattggtttatcagctttaggttataaagttgataatgaatcaacgcaatttgataaagctttagaaaatcaagttaaagctttccaacaagcgaataaacttgaggtaactggtgaatttaataaagaaacgaataataaatttactgagttattagttgaaaaagctaataaacatgatgatgttctcgataagttgattaatattttaaaataagcgatacacactactaaaattgtattattattatgttaatgacacgcctcctaaatttgcaaagatagcaatttaggaggcgtgtttatttttattgacgtctaactctaaaagatataaattagacatttacaaatgatgtaaataacgcaatttctatcatcgctgataacaattcatggtttaatatgcaatgagcatatactttttaaatagtattattcactagttttaacaatcaattaattggtatatgatacttttattggttatttttatcccatagtgtgataattactatttttcattcataataaaggtttaaagcatgttaatagtgtgtaagattaacatgtactgaaaaacatgtttaacataatgatataaggagtgacgtacatgatccgtctaggtaaaatgtcagatttagatcaaatcttaaatctagtagaagaagcaaaagaattaatgaaagaacacgacaacgagcaatgggacgatcagtacccacttttagaacattttgaagaagatattgctaaagattatttgtacgtattagaggaaaatgacaaaatttatggctttattgttgtcgaccaagaccaagcagaatggtatgatgacattgactggccagtaaatagagaaggcgcctttgttattcatcgattaactggttcgaaagaatataaaggagctgctacagaattattcaattatgttattgatgtagttaaagcacgtggtgcagaagttattttaacggacacctttgcgttaaacaaacctgcacaaggtttatttgccaaatttggatttcataaggtcggtgaacaattaatggaatatccgccatatgataaaggtgaaccattttatgcatattataaaaatttaaaagaatagaggtaatattaatgacgaaaatcgcatttaccggagggggaacagttggacacgtatcagtaaatttaagtttaattccaactgcattatcacaaggttatgaagcgctttatattggttctaaaaatggtattgaaagagaaatgattgaatcacaactaccagaaattaagtattatcctatttcgagtggtaaattaagaagatatatttctttagaaaatgccaaagacgtatttaaagtattgaaaggtattcttgatgctcgtaaagttttgaaaaaagaaaaacctgatctattattttcaaaaggtggatttgtatctgtgcctgttgttattgcagccaaatcattaaatataccaactattattcatgaatctgacttaacaccaggattagcgaataagatagcacttaaatttgccaagaaaatatatacaacatttgaagaaacgctaaactacttacctaaagagaaagctgattttattggagcaacaattcgagaagatttaaaaaatggtaatgcacataatggttatcaattaacaggctttaatgaaaataaaaaagttttactcgttatgggtggaagcttaggaagtaaaaaattaaatagcattattcgcgaaaacttagatgcattattacaacaatatcaagtgatacatttaactggtaaaggattaaaagatgctcaagttaaaaaatcaggatatatacaatatgaatttgttaaagaggatttaacagatttattagcaattacggatacagtaataagtagagctggatcaaatgcgatttatgagttcttaacattacgtataccaatgttattagtaccattaggtttagatcaatcccgaggcgaccaaattgacaatgcaaatcattttgctgataaaggatatgctaaagcgattgatgaagaacaattaacagcacaaattttattacaagaactaaatgaaatggaacaggaaagaactcgaattatcaataatatgaaatcgtatgaacaaagttatacgaaagaagctttatttgataagatgattaaagacgcattgaattaatggggggtaatgctttatgagtcaatggaaacgtatctctttgctcatcgtttttacattggtttttggaattatcgcgtttttccacgaatcaagacttgggaaatggattgataatgaagtttatgagtttgtatattcatcagagagctttattacgacatctatcatgcttggggctactaaagtaggtgaagtctgggcaatgttatgtatttcattacttcttgtggcatatctcatgttaaagcgccacaaaattgaagcattattttttgcattaacaatggcattatctggaattttgaatccagcattaaaaaatatattcgatagagaaagacctacattgctgcgtttaattgatataacaggatttagttttcctagcggtcatgctatgggatcaactgcatattttggaagtggtatctatctattaaatcgattaaatcaaggtaattcaaaaggtattcttatagggttatgtgcagctatgattttattgatttccatatcacgtgtatatctaggtgtacattatccaacagatattattgccggcattattggtggattattttgcattattttatcaacgttattacttagaaataaattaataaattaaatagtaaaatcaaaaccacccgtgtgaacgggtggtttgttctgcggctataagccttccttactggccagccctaaaagggcactgacaagtcagccaactgcactactattccagcaaccctaaagggttactcttttttctttctttttttatttttctctccagtgaaaggatctaaatattcttccattgagatttggtctgcaacgatatcctcttgtaattgattacgaatataattttcaatcacttttttatttctacctactgtatccacataaaatcctttacaccaaaactttctatttccatatctatactttaagttagcatgtctatcaaatatcattaaactactttttccttttaaatagccaacaaatgatgataccccaagtttgggtggtatactaactaacatatggatatgatctttacatgcctctgcttcaattatctctacaccttttctttcacataattgacgcaatataatccctatatctttttttatttttccatatatcacttgtcttctgtatttaggtgcaaagacaatatgatacttacaattccattttgtatgtgctaaactgtttgtgtcagatgacattaaatagcatctcctcgtgttgattattttggttggctgaccaatatttattctagcacgtagagatgcattttttgtgacaatggtagaaccttttctgaaccatacgcatagcgtatggttttctttttacaaaaaacaaaagcagtaaacctaaagtgtcgtaagggtttactgcttttataaaacgttgttataacgtatattgtcttttacgggcatataaaaggggaatatttgaaaatgaccaatccaacaagaacgaaacgttgtgggggggatgttctatgtggtattgataatcattttcaactactattatacattagtgagaatcattgtcaattagaaactaaaactttttttgaatattttttaagaatagtaaataaaacgcatgattacgctattttagaaaataaaaaaatttgtatttctcattagaattagaatatttaaaagtgatgaggtttaaacattatattgtttacatactccttttgaattcatacattatgaaatgttacttccaagttcaaaatcgcacattgaaatgatgtgtgaaatgtttaaactacggtcattttgtgaaaataaagataataactattcattttacaatagtgaaaagtcagtatatgacaacaattaatattgcggtaaggccttgtgttacagtattctatatttaagtactgcaatcagaattaacagaatgccattaactgattattaaatatttgagttaataaataattaatgattgtagcttgaaaaatttaaaacatggttattgatttgtgataaaatttaaacgtaaacaaactaatttaaaaagcaactattgtatagaaaaatacaaaatttaaaatatattaccttattagaaaaagtcgtaatatgaggtgtacaaatgacgcaaattttaatagtagaagatgaacaaaacttagcaagatttcttgaattggaactcacacatgaaaattacaatgtggacacagagtatgatggacaagacggtttagataaagcgcttagccattactatgatttaatcatattagatttaatgttgccgtcaattaatggcttagaaatttgtcgcaaaattagacaacaacaatctacacctatcattataattacagcgaaaagtgatacgtatgacaaagttgctgggcttgattacggtgcagacgattatatagttaagccgtttgatattgaagaacttttagcaagaattcgtgcaattttacgtcgtcagccacaaaaggatattatcgatgtcaacggtattacaattgataagaacgcttttaaagtgacggtaaatggcgcagaaattgaattaacaaaaacagagtatgatttactatatcttctagctgaaaataaaaaccatgttatgcaacgggaacaaattttaaatcatgtatggggttataatagtgaagtagaaacaaatgtcgtagatgtttatataagatatttacgaaacaagttaaaaccatacgatcgtgacaaaatgattgaaacagttcgtggcgttgggtatgtgatacgatgacaaaacgtaaattgcgcaataactggattattgttaccacgatgattacgtttgtcacgatatttttgttttgtttaattattatttttttcttgaaagatacactgcataatagtgagcttgatgatgcagaacgaagctcaagcgatattaataatttatttcattctaagcctgttaaagatatatctgcattagacttgaatgcatctttaggtaattttcaagagataattatttatgatgagcataataataaattatttgagacatcgaatgataacacagtgagagttgaaccaggttatgaacaccgttattttgaccgcgtaataaaaaaacgctataaaggcattgaatatttaattattaaagaaccaattacaacgcaagatttcaaagggtatagcttgttaattcattcactagaaaattatgataacatcgtaaaatcattgtatatcattgcgctggcatttggagtgattgcaacaattataactgccacaatcagttatgtattttcaacacaaattactaaaccgcttgtcagtttatcaaataaaatgattgagattcgacgagatggttttcaaaataaattgcaattaaatacaaattatgaagaaatagataatttagcaaatacgtttaatgagatgatgagccaaattgaagaatcatttaatcaacaaagacaatttgttgaagatgcgtcacatgaattacgaacaccattacaaattattcaaggtcatttaaatttgattcagcgatggggaaaaaaagacccagcagtattagaagaatcgttaaatatttctattgaagaaatgaatcgtatcataaaattagtcgaagaattacttgaattgactaaaggagatgtaaatgacatttcttctgaagcacagaccgtgcatattaatgatgaaattcgctcgcgaatacactcattaaaacaattgcatcctgattatcaatttgatacggatctgacatctaaaaatctagaaattaaaatgaaacctcatcaattcgaacaattatttttaatctttattgataatgcaatcaaatatgatgtgaagaataagaaaattaaagttaagacaaggttaaaaaataagcaaaaaataattgaaattacagatcatggaattggtattccagaggaagatcaagatttcatttttgatcgcttttatcgagtggataaatctcgttcaagaagtcaaggcggtaatggactcggattatctattgctcaaaaaatcattcaattaaacggaggatcgattaaaattaaaagtgaaattaacaaaggaacaacgtttaaaatcatattttaatcatgactgagacgtcaatcaaagtcataggatcaattttttaagtacacattagctgtgactaatgtataagaacaactataaaacaaataaacagtggttctttatcatttctgttgtactcccaaaatttacaataaaatacatctataaacctagaagaatcaacgcttttgttgattcttctttttagcagataaataggtaaatctactttaacaaataactaaatagtgatattattacattgtaagcgtttcaacatttttgtggagggtgtaaaatgactaacgaaagaaaagacgtttcagaggctcctgtaaacttcggtgcgaatttaggtctaatgttagatctatatgatgactttttacaagatccatcatctgtaccagaagatttacaagtcttattcagcacaattaagaatgatgactcaattgtaccagctttaaaaagtacaagtagtcaaaatagcgacggcacaattaagcgtgtcatgcgtttaattgataatattcgccaatacgggcatcttaaagccgatatttatcctgtaaatcctccaaaaaggaaacatgtacctaaattagagattgaagactttgatttagatcaacagactttggaaggtatatcagcaggaattgtttcagatcactttgccgacatttatgataatgcttatgaagcaattttaagaatggaaaaacgttacaaaggaccaattgcatttgagtatacacatattaataacaataccgaacgtggttggttaaaaagaagaattgaaacgccatataaagtaacgttaaataataacgaaaaaagggcactattcaaacaattagcgtatgttgaagggtttgaaaaatatattcataaaaacttcgttggtgcaaagcgtttttcaattgaaggggtagacgcacttgtaccgatgttacaacgtactattacgattgctgcgaaagaaggtattaaaaatatacaaataggcatggctcaccgtggacgtttaaacgttttaacgcatgtcttagaaaaaccgtacgaaatgatgatttcagaatttatgcatacagatccaatgaaattcttacctgaagatggtagcttgcagttaactgctggatggactggtgatgtgaaatatcaccttggtggcattaaaactactgattcatacggtacaatgcagcgtattgcactggctaacaatccaagtcacttggaaattgttgcacctgttgttgaggggcgtacgagagcagcacaagatgatacacaacgagctggggctccgacgactgatcatcataaagcaatgccaattattatacatggcgatgctgcttatcctggtcaaggaattaacttcgaaacaatgaacttaggaaacttgaaaggctattctacgggtggttcattgcatattattactaacaatagaattggatttactacagaaccaattgatgcacgttcaacaacttattctacagatgtggccaaaggttatgatgtgccaatattccatgtcaatgcagatgacgttgaagctactattgaagcaattgatattgcaatggaatttagaaaagagtttcataaagacgtcgttattgatttagtaggttatcgtcgtttcggacataacgaaatggatgaaccatcaattactaatccagttccttatcagaatattcgcaaacatgactctgttgaatatgtgtttggtaaaaagcttgttaatgaaggtgtcatttcagaagatgaaatgcattcatttatagaacaagtccaaaaggaactaagacaagctcatgataaaattaataaagctgataaaatggataatccagatatggaaaagcctgcagatcttgcattaccgttacaagcagacgaacaatcatttacttttgatcacttgaaagaaataaatgatgcattgttaacatatccggatggctttaacattttgaaaaagttaaacaaagttcttgagaagcgtcatgagccgtttaataaagaagatggtttagttgattgggcacaagcagaacaacttgcatttgcgacaattttacaagatggtacaccgattcgcttaactggtcaagatagtgaacgtggtacattcagtcataggcatgccgtgttacatgatgagcaaacaggtgaaacatatacacctttacatcatgttcctgatcaaaaagcgacatttgatatacacaattctccgctttcagaagcagcagtagttggttttgaatacggctataatgtggaaaacaaaaaaagcttcaatatttgggaagcacaatatggtgattttgcaaatatgtcacaaatgatttttgacaacttcttattcagttctcgctcaaaatggggagaacgttcaggattaacattattcttacctcatgcatatgagggtcaagggcctgaacattcatcagcaagattagagcgatttttacaattagctgctgaaaataattgcacagttgtcaacttatctagttcaagtaattatttccacttattgcgtgcacaagcggctagtttagattctgaacaaatgcgaccattggttgttatgtcaccaaaaagcttactgagaaataaaacagttgcaaaaccaattgatgaatttacttctggtggatttgagccaattttgacagaatcatatcaagcggataaggttacaaaagttattttggcaactggtaaaatgttcattgatttaaaagaagcattagctaaaaatccagacgaatcagtattactcgttgcgattgaaagattgtatccattcccagaggaagagattgaagcattactagcacaattgccaaaccttgaagaagtgtcatgggtacaagaagaacctaaaaatcaaggtgcatggttatatgtctatccatatgttaaagtgctagttgcagataaatatgatttaagttatcatggcagaattcaaagggctgctccagctgaaggcgatggagaaattcataaacttgttcaaaataaaattatagaaaatgcattaaaaaataactagggggaaataagtcatgccagaggttaaagttccagaattagcagaatctattacagaaggtaccattgcagaatggttgaaaaacgtaggggatagcgtagaaaaaggtgaagctattcttgaattagaaactgataaagttaatgtcgaagttgtatctgaagaagcaggtgtattatctgaacaacttgcaagtgaaggcgacactgtagaagttggacaagcaattgctatcatcggcgaaggtagtggcaatgcttctaaagaaaatagtaacgacaatactccacaacaaaatgaagaaacaaataataaaaaagaagaaacaacaaataattcggtagataaagctgaagtaaatcaagcaaatgatgagaatcagcaacgtattaatgctacgccttctgcgcgtcgatatgctcgtgaaaatggtgtgaatcttgctgaagtaagtccgaaaacaaatgatgtggttcgtaaagaagatattgataagaaacaacaggcaccggcatcaacacaaacaacacaacaagcatctgcaaaagaagagaaaaaatacaatcaatatcctacaaaaccagtgattcgtgaaaaaatgtcacgtagaaagaaaacagctgccaaaaaattattagaggtatctaataatacagctatgttaacaacatttaacgaagttgacatgacaaatgttatggaattgcgtaaacgtaagaaagaacaatttatgaaagatcatgatggtactaaattaggatttatgtcattctttactaaagcttctgtagcagctttgaaaaagtatccagaagttaatgcagaaatcgacggcgacgacatgattacgaaacaatattatgatattggtgtagctgtttctacagatgatggattattagtaccatttgtaagagattgtgataaaaagaattttgcagaaatcgaagcagaaattgctaatttagcagttaaagcacgagagaaaaaacttggcttagatgatatggttaatggttcatttacgattacaaatggcggtatttttggatcaatgatgagtacgccaattatcaatggtaatcaagctgcaatcttaggcatgcattcaattattacaagaccaattgcgattgatcaagatacaatcgaaaatcgtccaatgatgtatattgcattaagctatgatcatagaattattgacggtaaagaagcagttggattcttaaaaacaattaaagaattaattgaaaacccagaagacttattattagaatcttaatccacaacacaaaatagtttactattcctaaaagcgggattaaatcaataacaaacagcagtaagattatttcctagtcgaaatatcttactgctgtactttatttttataatgattcgtattaaaatgtgggtttaattttgactacttaaaaaatatatcatttctattgaaatagactcacaatagaaatataggtagaatagcgtgtttcaatatgctaatgaatgcattttagataataacaaacgatgaaatatatgaattctataagcgcctttagttaatttaaaatcatctgaacatgatgtaaattcgctttatggacacgacatatatatgtttttcatgtcctacaaaaaacgaaatattcaattgctatatacagatattcattaatgacacactcaatagcaaccataacaatattatgttacctatttaaatgaaatagttcttttaaagaaatacatttttcacatattaatctataatcaaaatcaactgaccgatattctataatttatgattaaaataagttataatataatagtaaagataaagatagaggtggctataatgtgtggacttagaagtataacattaggtacaacaaatatagaacagacaaaacatttcatggttgacatattaggattaaattatgaagaacttcttgaaaactcaattcgtttcggcgatgcagatataagcccaggaacaagacttcaatttatacaagttccaagtgagcaattagaagaatctcactttgtgggtattggattacgtacaccaactgactcaggtttagaggagtatgcggaaatattatcgaataaggatattccatttacaacagttaaagaattaaatggcaataaatatttcagtctcgaagataacaatggtcatattttctcaatatattcaaacgagaataattatggcgttggtttaggtatgccttcttttgagagtgcggtcaatccgttacatcaagtgcaaggtttaggaccagtgattcttaaagtgaatcatgtagatattacaggtcaaattttaacaaatatattcggacttgaagtatttgcagaataccaacccttcgacaatgctgactatcatgtccaagtattcaaagttggaacgggtggtctaggtggcgaaatacatttaatgcctgtagaaaccgaaatgacaatgccggaatatggcgcagtcgatcaagttgagtttgaaacgaaagatgcagatttctttaatcaagcgaaatcgcgcttagatgaagtggaaataccatatcaaacgcttgagcaagatgatattgaatcaattagaattactgaaaacagtggattatcgtttatattcactttacaaaaataatttttttacgatagcgaggacaaaatttatgttacatgaaacttggaaagaacgtacaccaatcaagaaagtagaagtcattaatacagatgcaaagaaatttacagtttctgacatgttaacggttggcaaacaatatgatgttatcaacgaaactgaagaatattatcaaataatagataattctggattagttggcggttactataaaacatatttcaaagaagtttaaacgcataattattgaaatgaagcctaatatgagattttcaattagtaaatttggtaaaatataaacaattcgcatactaagcattgcgttttatatcagaatagaatagtaaactaaggcatttggagaacttattccatgtcttagttttttaatttatttaaaggagaacgttttaaaatggcactaaaacattataagaattcagattcaacagttttcaatgatgcgaaggcattatttgatttaaataaaaatattttacttaaaggtccaacaggttcagggaaaacaaagttggcagaaacattaagtgaagttgttgatacacccatgcatcaagtcaattgttctgttgatttagatacagaaagcttattaggctttaaaacaattaaaacaaatgcggaaggtcaacaagaaattgtctttgtagatggtccagttattaaagctatgaaagaggggcatattttatatattgatgaaataaatatggctaaacctgaaacattgcctgtattaaatggggtcttagattatcgtcgtcaaattacgaatccatacactggtgaagtaatcaaagctgtaccaggatttaacgttatagcagcgataaatgaaggttatgttggtactttgccaatgaatgaagcactaaaaaatcgctttgttgttattcacgttgattatattgatggggacattttaaaaaatgtgattaaagagcaaagtttattacaagatgataaacaaatcgaacaaattattaagtttaatgaagatttacgtactatgtctaagcagggacaaatttctgaagaagccgctagtatccgtgcattattagacttgtgtgatttaatcactgtaatgccagttgaacgtgcaattaaacgtacaattattgataaattggaagatgaacgtgaacaacaagcaatatataatgctgtagaactaaacttttaaagagggataaaacatgagtgatcgtttcataaaatttaatgacgaacagttagatgccaagcaagtaatgatgttgcaagacttagctcgactcttattaaaaaatgaacaaacacaagttaaaatccaaaaattcccttactataatcctgttcaaaatgttttgattacgagttggttttggtcacatcgaccaagccatatcgaaatggctggtttaaaaacagatgttatgttagctgcttacggttatcatatgatggatgtacaaattgtaaatgaagtagtacaagataaaacttttaaacaccctaaattttatcaacaactttttaaattattagaagatatgcgcgtattaaattctattaaagttgagcgcccaagtactgctaaattaattgatcttcgcttagatacacgtatatcatatacggaatctcaaattaaagtgtatcgtactaaaacacaatatacagatttattatttttgtatttagaacatgcatttttaagccaagatttctttgatataccatctatacattcagatttagatgatattttagtaaatatgttcttatatttacctaattttttccaaaatcaaaattctgaagataatatgtatctggctcaaagaattatgtatcaagtagatgatattttaaaagaagatatgctaaacgaatattattacttacctaaaacactatataatacattagctagtccagagtttgatgatttaaagagaactgatgcaagtcaagtcgatgggcaagatgatacttcagaagatgatgataacgaaagtgaaaaagctgactctaaatctgcagatagtgagtcaaaaggtggcgcctatttagaaatggagcttcacgaaggacaaaatagtgaaacattaggtaatgatgaagcacgtgaaggcgatgctacagatgatatgactgatatgatgaccaaaaagggcaaaggatcaaacgatacgctaaatcgtgaagaaggcgatgctgttggtcaaagccaagcatttcaacttgatggtgtgaacaaaaatgtagaaataaaatggcaaattcctgaaattgagccacaatatgttttagaatatcaagaatcgaaacaagacgtacaatatgaaatcaaagacttaattcaaattataaagaaaacgattgaacgagaacaacgagatgcacgttttaatttaacaaaagggcgattacaaaaggatttaattaattggtttatcgacgatcaatataaattgttttacaaaaaacaagatttaagtaaatcatttgatgcgacatttacattgttaattgatgcgtcagcaagtatgcatgataaaatggctgaaacgaagaaaggtgtagtgttattccacgagacgttaaaagcattgaacattaaacatgaaattttatcattcagtgaggatgcctttgattcagacgagcatgcacaaccaaatatcattaatgaaattattaactatgattactcaacctttgaaaaagatggcccacgtattatggcacttgaacctcaagatgataatcgtgatggtgttgctattagagttgcaagtgaacgattaatgcgtcgaaatcaacatcaacgatttttaatcgtattttcagacggcgaaccgtctgcatttaattatagtcaagatggtattattgatacgtatgaagctgtagaaatgtcacgtaaatttggtattgaagtatttaatgtatttttgagtcaagatccaataactgaagatgttgaacaaacaattcataatatttatggtcaatatgctattttcgttgaaggtgttgcgcatttacctggacatctctctccattattaaaaaaattactacttaaatctttataaataaatttaaaatatgagtttatatgaaattgtgaataaaagtcatcagttactatttaaaaagtggatttgaagaattttattttctgacataatttgatttaaacaacacatgtgttttgtttctgctatgtacaacatatttcatatagactctttattattttttgtgctaaaatatttacttgtaaattatttcgtgttttaaaaaaaggagtaactctatgaataaaaatacatgggtcattgggtttacgctcttcgctatgttttttggcgcaggcaatctaatttttcctcctaatctcggattggatagtggtcaatttttctggcccgccattttagcgtttgttctaactgggattggtttaccattattaggtgtgattgtaggtgcacttgataaagaaggatatattggcgcattaaataaaatttcacctaaattttcaatattgttcttaatcatcatttatttgactataggaccactttttgcaatacctagaactgcatctacatcttttgaaatgacaattacaccaattatacatagcaatagtagtatcgctttatttatatttacgattatctacttcatagtcgttttgtatatttgtttaaatccatctaagttaatcgatcgtattggttcattattaacaccattattattgattactattttagcgatgattattaaaggatacttagactttagcggtaatagtgctggaaagggcaatgaagcactatatcattctaatttttcaagttttgctgaaggctttacacaaggctatttaacaatggatgccattgcagcaattgctttttcaatgattgttgttaatgcagtaaaactaacaggcattactaaaacaaatcaaatattcaaacaaactttgactgctggtttaattgcagccgtagctttaattttcatatatatttcattaggttatattggtaatcatatgccagtaagtgacatgacgttacatcaattgaaatccaaagatcgaaacattgggacatatttattaacgacaatggcttcaacaggatttggttcattcggaaaatatttattgggcatcattgtggcgctggcatgtctaactacagcatgcgggcttattgttgcagtttctgaatatttccatagaatcgtacctaaagtatcatacaaagcatttgtattagttttcattttaatgagttttattattgctaaccaaggtttaaatgctgttatctcaatgtcaattccggtattaagcattgtatacccagtagcaataactgttgtattattaattttaattgccaaattcataccgacaaaacgcatttcacaacaaattccagttattatcgtatttatattgtcgattttcagtgttattagtaagttaggttggctgaaaattaactttatagaatcattgcctctaagagcgtattctttagagtggttcccagtagcaattattgcaacgatattaggctatctagtcggcatatttgtaaaacaagatccaattaaatatcaacaggaataacgaataatataaaagaggttgggacataaatccctaaaaaaacagcagtaagataattttcaattagaaaatatcttactgctgttctctatttatacaatacttcgtattgaatggcttcgctttcctagggtgccgtctcagcctcggtcttcgactggcactgctccctcaggagtctcgccattaatactacgtattaacgtgtaattttactttgaaatactttaaaaaaataagacactttgcccagataaagtccgtataattgtgtaaaagtaaaaaggccatataacagtccttttacggtacaatgtttttaacgacaaaaacatacccaggaggacttttacatgacccaagtacattttacactgaaaagcgaagagattcaaagcattattgaatattctgtaaaggatgacgtttctaaaaatattttaacaacggtatttaatcaactaatggaaaatcaacgaacagaatatattcaagcaaaagaatatgaacgaacagaaaaccgacaaagtcaacgaaatggctattatgagcgcagctttacgacacgtgtaggcacgctagaattaaaagtacccagaacacgtgatggccatttttcacccacagtgtttgaacgttatcaacgaaacgaaaaagccctcatggcttcaatgttggaaatgtatgtatcaggcgtttcaactcgtaaagtatcaaaaattgtggaagaactttgtggtaaatccgtctctaagtccttcgtttctagcttaacagaacagctagaacctatggttaacgagtggcagaatcgtttattatcagaaaaaaattatccttacttaatgaccgatgtactctatataaaagtacgagaagaaaatcgagtactctcaaaaagctgtcatatagcgattggaataaccaaagatggcgaccgtgaaattatcggcttcatgattcaaagtggcgaaagcgaagagacctggacaacattttttgaatacctaaaagaacgcggtttacaaggtacggaactcgttatttctgatgcgcacaaaggattagtctctgccattagaaaatccttcaccaacgtaagttggcaaagatgccaagttcacttcctaagaaatatctttaccaccattcctaaaaaaaattcaaaatctttcagagaagctgttaaaggaatttttaagttcacagatattaacttagcgcgtgaggctaaaaatcgattgattcatgattatatcgatcaaccaaaatattcaaaagcttgcgcatcattggatgatggattcgaagacgcctttcaatataccgtacaaggaaattcccacaatcgactaaagagtaccaatctaattgaacgactgaatcaagaagtacgcagaagagaaaagattattcgcatcttccccaatcaaacatcagccaatcgcttaattggagccgttcttatggacctacatgatgaatggatttattcttcaagaaaatacatcaattttgataagtagaaatggtaaaaacattgtatagcattttacacaggagtctggacttgactctttgcccaacttgcacataaatgtaaaattcaataaaataaattttctgtgttggatcccttcgtataatttaataaatactactaaactaaattaacgaggtgccttatgtataaaaattataacatgacccaacttacactaccaatagaaacttctgttagaattcctcaaaatgataatacgcgatatgttaatgaaattgttgaaacgatatctgatagcgaattcgatgaatttatatgtcctaataacaaaagaataggttttaaaagatatgcataccgtaatgatagatatagttttaaacgtgacttcaagctatatgaatgtgatgactgttcatcatgttctttgagacatcaatgcatgaagccaaattcgaaatccaataagaaaattatgaagaattataattgggaatactttaaagcccaaattaatcaaaagctttctgaaccagaaacgaaaaaatctatagtcaaagaaaaattgatgtagagcctgtttttggatttatgaaggctattttgggtttcactcgaatgtcagttcgaggaataaataaagttaaacgagagctaggttttgtattaatggcacttaatataaggaaaatagcagctcaacgagctgtacattataaaatacatatcaaaaaaagctgatttctatcaaataaataatagaaatcagcttttttacattgcctaagaactttaaggaacttaatgtcccaagctcttttttgttatatctaattcgtaatttatgattgtttattcggtcctttgatgttcactaaatgtgactttaaatcttgttctaattgttgtaattctttttcagctaattgtcgttcttcgcgaccgtgttgttgaataattaatgtttcttcaattgtctcaataatgttacgctgtgtacgtttcaatgtatcaagatcaacaatgccacgctcattttctgttgcagtttcaatcgcattttgtttcaacatttcagcatttgctgttaataaatcattagttgtatcagtgacagctcgttgtgcagcaactgcattacgctgtctcattaatgtaagcgcaatggccatttgatttttccatagtggaatacttgtcaaaattgaactttgtatcttctcggcaagtgcttgattaacattttgaatcatacgaatttgtggcgcagtttgcaaagctatttgtcttgaaagctgtaagtcatatatgcgtttatctagtctatctataaattgctgcatatctgcaacttgttgaatatccatttgattagtggattgctgcgcttgctgttgcaattgtggtagcttttcattttctaattgcaactttttttgctgtgcagcaatgatatgcaatgataagtcatcaaagtattgtttgtttttatcatatagcgtatctaataattcaatatctcttgttaaatgtgtttgatgtttctgcagttgaatcgttatgcgatcgacttgagcactaactgattgcattcttgaaaagatttcattgatagacgactttgctctgctaaaaattctttttaacatagatggtttatcagtatttaactcatttggattaactgactttagttttgacattagatctgacaaagtatctccaataggaccaacatctttactttgtacttcatccaacatttgatgtgaaaattgagacatttgtttctgtaaatcagaaccaaacgctaataaaccttcattgtctaaagggttaatttgtttactgattgtgtctacctgtttttgttgttcaattgttaacttttctttttgaatagtagtattcgataattctttatcgcttataaaatcatctagtggatggctttctttgaaacttttattttcagtcatcaatcatctctccaatagttgctattttacatcaatcttgatgatgtttttgatgtaacttatttaattccatttcaatatctaaacgttcataatcatcttcgttgagacgctttaaatcagcgattaatgttcgtttgacctcatccaaagtaattcgtgtttgttctaacttttgctgttcattaattgattttttgggcatttttgctagacgtgtatatgcatcaaccaaatttaaagcattatcaatatgagaataaaaaaagccttcaactttataaaatgatgcaggtctctgtctaactgtcgtataaatagaacgtgaaatttggtatatatcattaatctgcctaaaatctttaattgatcttatattgacatacgtttttaaaatacctctaagtttttggtgtgtatgatttaactgatttcgaatatagcgatagtcttttctagtcaaaccaatttcgtttaaatatttgcgtgaagtgagtttttgtatcggtaggtatgtcattaaaaagccaacaataccaatagacatatcaattaaaaaagatacatcaagtgcaatcatcccaaatatgcttgttaaaaacgctacaggaattcccactaacaccccaaatatatgagaaatattatatctcactgtcatcttcctttatttagcattttatattgatcgaaaatccgataatttttgatttagttctaactcttcaagttgatggcttgttacatttgatgctggtgaggcaccttcaattacaccttgaataaatctctctatatctgcgtcatccccttgtgcatatatctctacatagtcatctacattttgaacagtaccgacaatgttatagttcattgcaatgcgttgtgtaaaatatctaaatccgacgccttgaacgcgtccgaatacttgtaaatgtatatgtctcatttttaccacctcataatgttattatacgtagttttacttaaaaaaactaataattactatagttactactttgtttgtttcaagtcgtcaaacttgattttcagaggataaaggtataaaaataagtatagagtttttgaagtatggaaggggtctttaataatgtggacagttaccaaaattagagccgattatgagggatggtggttattcagtgactggccagaaaacattgttgaaaaatatcaatatcaagattttgatgacatgtttaagcactatcaacaattgattaatcaatgtaaagttcagttcgataactatgtcacaggcaaatataatatttatgcattttataataattgtgacatgaactattgcgaagattgtgaagaggatttacaaatattttatagtttcattgttttacaaaataatgaagtatattataaactaccaataattgattaaatgaatattttttattattgtattgcaatttggtaataactgcactataatacaagttaagcagatgattattccatattgcaaagaatatttgagtgaaatttgcatgtattttttgtaatatgcgaataagcatattgaatgaattttagtcttggaggtttcagattatgaaacaaggtacagttaaatggtttaacgctgaaaaaggattcggctttatcgaagttgaaggagaaaatgacgtattcgtacatttttcagcaattaaccaagatggttacaaatcattagaagaaggtcaagctgttgagtttgaagtagttgaaggcgaccgcggtccacaagctgcaaacgttgttaaactataattcttagatttgaatcattgattttaactaacaccttaccaagaagtaaggtgtttttatatgcttattacaaatacttaacgcgatgagtttctcaaccaaattgagaactctttttttatatcaccaacattgtttgcaatagaaaaatatatttatataatataattatggtgtacaacgacgaggtgattttatgaaatatcttatccttagtttagttgctaatttattagttttcggtgtattatctgcaattggattaaatattaatattttagcagcaatgatgattgtattagtgattccgataatgatttctgggatactatttttcaaaactaatattgataaaacatacatattttttaacatcatatttatcgacttttattactatatttacaatgtacatttaatgactttgccaaagtttaataattatattaaagcagagatgatggaattagaagatattgatgtattaattacaagtaaagattttggatttgatgaaattctgttttatacattatatttgttgttaattcttatcgttttatattatttgaaaaagcaagtaaagcataaaatctaatttcatgatgcttgtttaaagtgtggtatgtatatgatgctttaaattagttgaatagggctaactaaatataaaggattaatgacaaaaagaaataaatactttctaactaaaaatgtgctgttcttccttttttagagtatatgtccaagcatgttttctacagtcatctataatgcataaaaattccccgagtcacagtataattttctgtgcttcggggattactttgtttatttttattttgtatcattaataatgagttgtcttaacgattgtcgctttataacttcacgtgctttgccatcttttaagaaaaacacagaaggcttttgcatttgattgtaattggatgccatagagtaatgatatgcaccagttgataatatagcaagatagtctccacgtttgactgatgaaggtaatttagcgtctttaataatgatatcaccagactcacataattttccagctatagttacactgtcatctgcttcttcatttctattaacaagcaatgcttgatactttgcgtcataaagtgcagttctgatatgatcactcataccgccatcgattgaaacatatttattaatctctggaatttctttaatggttccaacttcatataaagtaacgccagcttcacctacaattgatcgtcccggttcaatacctatttctggtgcatctatacctagaactttaatttcggattttattgcgtctgtaatatctttaataccactttcgatagggaaactttcgtcaccttcaacatatttaataccaaagccaccaccaaggtttaataattcaacttgaatgccttgctctttaagccaacgtaaaacaattttagcagtttcaataaatgcttctgtaccttcaatctgtgaaccaatatgacaatgtacaccttttaattttaagtgtttagattgttggactttgtcaattgcttttttagctaagccatattgaattgataatccaaacttactatcttcttgcccagtttgaataaattcgtgtgtatgtgcttcaacacctggattaactcgtaatacaacttgaaccgtatcattagcatagcggtctattaattcaatttcttctaatgaatctataacaaaataaccgatattattttctaaagcatacctaatttcatgtttcgttttattgttaccatggaaatggatgcgactcggttcaaaacctgcttctaaagctgtatataattcaccttcagaaacaacatctaactgtaaatcttcctcagctacaagtttgaccatttgaatgcaagtaaatgcctttgaggcgtatgaaatattgtattttaatccactatctttaaatgcgcgatggtaacggcgcatctgttctctaatttgtagttcatcataaacaatggtaggtgtaccaaagctttgtgcaatcgtttttaaactaataccatccattgttaattcgccattttgattatatttaacagtcatttgaaatgtactccttttttaaagaatcatgattcatagcacttaattgttcagaatttgcaccaacacctttaaaggtatattcatcgatgcggatatcattattataaagaataacttcatcttgtgcatgtacattgccatctacttcaacaaacatatggctcatcattaatgcacgtatcgggtagcgtttaccattgataagtgcttcatgtttagcacgagttcttaaaattccatcgccataaccgatatcaactacagctaattttgtattgtttttagtcacttcaaaggcaaagctataaccgcaataatcaccagcttgtacttcgcgcacttgaataacatgtgcttttaaagttaatgactgaactatatcatgttgattcagtgaactatatggtcttgaaccgtataacgcaatacctacacgcgcatgtgtatggtggggtagtaatatttgtccttcccgataaaaactcgcactattttgagcatggattaggtcgaactgataaccttcagataaaagtgcttcaacaatttccatccattgtgaacgttcaacattataatctgacacatcgaattcatcagcatatccaaaatgggtccataaaccactaataatcatttttgcattttgattatgatggtgatctttcaatacttctttaatttcgtttaaatctttaaatccagaccgatgtaataaattttcaaattctaagtgaacatgaataccagctaaatcatttttatggttatagtaatatgtcaacgacggcaaagtcatatgtatttgatgttcacggactaaatcaaactcgtaaactgcattcattaaaaagattgttgcatctggagcaagttgtctaatttgaattgcttctcgtagtgatgttgtgctaaatgtatctatacctgcatggataaactgagttacagcaaattctaggtcatagtgatatgcattatttttaacaactgccattaatggctgattgtttttgactgtgattgcattttgtaaaaatattttcttatttacagaccatgttgctgtcaatgtattacacctctttgtaattatttaataaattttcgtaaaaattaaccacgtttattaacactttttcatcaaaatttaaatgtgatgtgtgcaaaccagttacaaaacctttatcttcatttcgtgttcctataaaaacaaagtaagctggagctagttgttgaccataaaaactaaaatcttccccaaataagaatggcgttggtttgtcatagacatttaaatcagcttttattaaggcgtcctctatttgagtacgtaatttcggactattgattgtagggggataaccttctgcaaatttaacttcacaatctacattaaacagaagcttgacactttctgctatcttgtgcatttgatttttaacgattgttaaatcatcaatatcatatgtacgaatagtaccttctaaatagccattacttggtacagtgttaatcgcttcaccagctttaaaatgaccaatatgaacaatatttcgtttcaaaccgttaaggtgaaattgttgaatttgtgatatttgagttaatacatgttgtaatgcttcaccacaagaatgaccttgttctttatcagcaacatgacttgacaggcctgttaagaaaaagcgatactctgttgcgctggccgtaatttcttcatctcttatcactgcaatgccttcatcagcaaatgggttaacatgaataccaaataccgcttcaattggatacttatcaaaggcaccggcttttattaatcgatttgcaccgccaccagtttcttctgcaggttggaaaatgaaaacgacattttgcggtaattgacctgcatcttgcatgtctttgcaacgttgtacaaaaagcattaatgcagttgtatgaccatcatgtccacaagcatgcatcacatgatcagattgactgcgataaggcacatcattttcctctaaaataggtaacgcatcaatatcagctctatacgctatcgtatgtgagccattaccttctaagtatgcaatgacgccagtttccaatgggcaatcgtatttaatatttaaactatctaaaaacgctttaatataagcagttgtttcaaattcatgtaagcttaattcaggatgttgatgtaaatgacggcgatgtttcgtaacaaattctaattcattcataattatcaatcctttgtgttaaattactatataaatagtgtaacgtatttcgaaatttgtgatcataagtttattcaatgctaaacaataaggttgagacataatcgtatctcaaccttgaaattattatacgttgacgtcactagtcattcagttttcttaatgctgctacaatctcttttttagtatcttgtacttcagaagcttgcttaatcacttttgcaggtgtaccagcaacaactgcaccagctggtacatcttgtgtcacaatcgcgccagctgcaacaatagcacctttaccaacacgtacaccttctaaaataactgcatttgcaccgattaatacatcatcctcgattataaccggtgaagcactagggggttcaatcacacctgctaatactgcgccagcccctacatgtacatttttaccagttgtagcacgaccaccgagagtagcattcatatcaatcattgtaccttcgccaacgactgcgccaatattaattgttgcgcccatcataacgacagcaccatcttcaataatggcttgttctctaataaacgcacctggttcaattcgtgcattcgtatttgttaagtcttttaatggaatagcagaattgcgacgatccatttcaatttctatatcttcgaattgactaccatatgcttcgtaaaaaggtttccaatcatccgcttcacaaaagattactttagattgttctgaaccaaatactttaaaactttctggatatgtgatgccttcaaaattaccatttaaatatacttttattggtgtagactttttagcatcacttatatattgaataatttcttcagctgttaaatgttgtaccataaaataatcgatctcctttaatatgtttataagttgtcaaacgtataaaagccgtttggtttattaactaagcgttctgctgcttgtattgcaccattcgcaaaaatatcttttgattgtgcacgatgcgtgatttgaatcgtttcatcagtgccagcaaatagaacttcatgttcaccgacaatcgtacctccacgaatagaatgtataccaatatcttgtggctggcgtttttcatttaattcatgtctatcatacacaggtgttacattttctttcaaagatacgatcacatcatacaatttttctaacgtaccacttggtgcatctacttttttattatgatgtgcctcagtcaattcgatgtcgaaatcatcaagtaggggaacagcagctgctaaaattttagtcaatgcatgaacgccataactcatgttcgcgctgaaaaacacaggcatattttgactcaattcatctaacttattaagtagtttttctttctcgccagttgttgccacaactaatggcaaatgaaaatcttcatctaataaagggaaaagcagatttggatttgaaaaatctattgcaacatcggcacctttaacatctgcaatatgttgatattgttgatatggcgttgttgctttcggtgtattttcaatgaccccaacgatttcatgtcctttttcttctgctaatctagcaacgcgttgattcattgcgccatagccaattagtaatattttcactcattttcacccgctttaaatgtgtcatatgtttcacgaagcactttagtatctgtatcttctaggctaaccaatggtagacgtaattcataatttccaaatcctaaataacttgttagagctttaataggaattgggttaatatcaactgataaagctgataacagtgtgccgattggtttaaattgatcttgaatatctaatccactttgttgagcatcgtataacgcttgaaattctttaggaatgacattggcaataacagagataaccccttgaccgccacgttgatagtattcgacgacgttgtcatcattgccactatataatgcaaatgaatttgtatcaatgcgctttttcacttcttctaaatactcaaaatcattcgtagcatcttttaaagcaactatataaggatgttgacttaatatttctacagtttctggttcaattgtcatgttcgttcttgaaggaacattgtacagcacgactggtaatttcacagcatctgcaatcgcttcaaagtgtttgactaaaccacgttggttcgttttgttgtagtagggcgtaattaacataattgcatcagcccctaaggctttagcttggattgaagcttggattgacttttcagtatcattagtgccagttcctgctatgacaggaacacgtttatctacaagatcaataactgtttttagaatgcgttctttttcatctgttgttaaagtagggctctcagcagtagttccattaacgatgattgcttgggcattattttctagtaaaaaattaacgtgtgttttcaaagcttcaatattaactttgttatttgtaaaaggggttgtaagtgcaacgccaacaccctcaaataaatgtgtcattttaattcgctccttttaaacgcataacttgttccaatacttgtacagcatttaatgcagcaccttttaataaattgtctgatgtacaccatacatggaaagtattttctaatgaatcatctctacgtatacggccaacaaacacttcatctttattagtagaattgattgccattggatattcattgttctctggattgtctactaaaacaacgcggtcatcttgatcaaataacgctttaatatcttctgctgttgtttctttgtcaagcgttacatcaatttcaacactatgactatcttgaacaggcacacgtgcgcatgttgctgttacttttaagtctggcgcatttaaaatttttctcgtctcatcaatcattttttgttcttcttttgtatatccgttttctaaaaacacatcaatatgcggtaacacattattataaattggatgtggatatgcttctggtgctttaccatttacaccttcagctaaatctttcttacctttcatccctgaacctgatacagcttgatatgttgtatatgccactcgttttaaaccataagcatcttgcaatacttttagaggtacaacagattgaatcgtagagcagtttggattggcaatgatacctcttgtaaatgtaggttcattgacttccggaacgattaaatcaatatcttctgccatacgccattgacttgaattgtctataacgattgcaccagctttttcaaaaagtggggcaaagtgttcgcttgtaccgccaccagcactcattaatacataatcgaaatgttcacttgcacgagcatcagttaattcttgaactgtatatgtttttccttgaaattcaacttcttgccctgcagaacgtgctgatgaaaataatactaattcatcgaaaggaatatttttacgatttaatgtctccaacatttttgtacctactaatcctgttgcacccacaactgctaactttgtcataacttgtcactccattttataataatttccaatttttagaatattttaacaatcattttaccattaaatgttaaatgcgtcatatagtttttctaccgcttgttgcccattaaaatcatcaatgacgtatgaaatacttatttcagatgttgttgtttggtagaaaggtatattattttcaattaatgtcaaaaatgcttttgatgccacacctgacatatcacgcatgcctgagccaattaatgaaattttgacataatgctcattgattttataagctaatgcttcatattgattctttaatgtttcaagaatcatagaaatttgatgaaaatcactatctttaatcgtgaaggatagttgtagcccatccaagttgacgatttgtgaaatcatatcaacatttacagcaccttcttcaagttccgtaaatagttgggtaagtagctgattgtcaggtaggggataactaattgttacatgcatcatatgtttatccaaagccacaccagtaactgcttttttctctaatatttcttcatttgatataatccatgttcctttcacgttcgataaagtttttcctaaatataaagggatattatagtttttagctaattcaacacttcttgtttcaagtacaccagcacctaaagcgctcatttccatcatttcttcatatgagacgatgtctagtcgtttagcctttggtaaaagtcttgggtcagtggcatacacaccatcaacgtcggtataaatttcacaaggtatttgattactaacagcaagtgccacagcggtcgtatcagaaccacctctgcctaaagttgttaattcctgatgttcattgatgccttgaaatccagcaactactaaaatatcgttttcttgaaaggcttgttcaaatgtttgaggattaatttgagcaattttactttttaaatgatggccaatggttttaatacccgcttgatagccagtcattgctttggcattcataccgatatcatttaataccattgataaataagatacagtttgttgctctccggttgtcaataataatgccagttcttgttgttttggtgctttagtcaaggttgatacattcgtcattaattgatctgttgtgttacccatagcacttacaacgacaattaattgttcatcttgattgactcgctcctttaacatttcagcgatcctttttatttttgtaaaatcactgacggatgatccgccaaatttcaacacacttcttgttaccatataatcctcctaattgttaggaagggcacacaataataaaaaaagaacaagttcggaatgcgaacttgctcttaatctatatacaagtgatgcactccattatttttaaataatgacaaactctcagctcttaaccaaaaagtccaacaaattataactgctattataattgcttcggcatcgcaccctttcaaatttagctgttagcagacagtaatctaaactttactcatgattgatgcgcctcatcaaaatattattaaattggtatgtgttcattatacatatgacaaatatgaatgtaaaccgataatttagattttttggaataacctgaaaattcaagttatagcgttgcttatattttaaaaggtggtgataatgagactttttgaaaaataaaattcaaaatacttatagcataatcaatatgcacattaaataaatgtactcttttaatgcgttgataactgtatttgtaatttagagaaggggtgttcactatgctgatgtgttaaaaaataaaatcaaaaccacccgtgtgaacgggtggtttgttctgcggctataagccttccttactggccagccctaaaagggcactgacaagtcagccaactgcactactattccagcaaccctaaagggttactcttttttctttctttttttatttttctctccagtgaaaggatctaaatattcttccattgagatttggtctgcaacgatatcctcttgtaattgattacgaatataattttcaatcacttttttatttctacctactgtatccacataaaatcctttacaccaaaactttctatttccatatctatactttaagttagcatgtctatcaaatatcattaaactactttttccttttaaatagccaacaaatgatgataccccaagtttgggtggtatactaactaacatatggatatgatctttacatgcctctgcttcaattatctctacaccttttctttcacataattgacgcaatataatccctatatctttttttatttttccatatatcacttgtcttctgtatttaggtgcaaagacaatatgatacttacaattccattttgtatgtgctaaactgtttgtgtcagatgacattaaatagcatctcctcgtgttgattattttggttggctgaccaatatttattctagcacgtagagatgcattttttgtgacaatggtagaaccttttctgaaccatacgcatagcgtatggttttctttttacaaataaaaaggacacctcgatgctataaatattagcatcgagacgcccagttaatgtctattaaattgaatatagtctcggacatgaatcaatgccctaggccctgcaatgttatattgacagtagttgactgaatgaaaatgactttgtagctagcttttttcaatccttgtcggtgcaacacatagagaaattggattcctaatttctacaaacaatacaagttgcggaataagtcccaatatagaaggtgacagtaagccaacttacaataatgtgcaagttggtcgggcctcaatacagagattttcgaaaagaaattctacatattatgtttattttaaaacgccgatttcttgtaaatattcttcatatggaatttcttttgaaacgccaccttgtttatttaaatcgataacacggtttgcgattgtattgataaattcaaagtcatatgaagtaaagataatagaacctttgaatgatttaagtccatcattaacagcagtaatactttctaagtctaagtggtttgttggttcatcaagtaaaagaacgtttgcacttgataacatcattttacttagcatacaacgtactttttctccacctgaaagtacactagcttttttcttaacttcttctccactaaatagcatacggcctaagaagccgcgtaaaaatgtttcagtttgctcatcttctggtgcgtattgtcttaaccaatctacaaggttcatattaacgccctcaaagaattctgagttatctttagggaagtaacttaatgacgttgttacaccccatttatatgaaccttcgtctggttccatttcaccggctaatattttaagcaatgtggttttcgcaatttcactatccccaattaaaattgctttatcatttggattcattgtgaatgaaatattatctaatactttttcaccgtcaatcgttttagatagattttgaacgattagtaagtcattaccgatttcgcgctcaggtgtgaatttaacgaaaggatatcttcttgatgatggttgaatatcatctaattcaattttctcgagttgttttttacgacttgttgcttgtttagatttagaagcgttagctgagaaacgagcaataaagtcctgtaactctttcattttttcttcttttttcttgttttgttcttgagccatcttttgagctaactgactagattgataccaaaaatcatagttaccaacataaactttaattttaccgaagtctaaatcagcgatatgagtacatacattatttaagaaatgacggtcatgcgatactacgataacagtattatcaaagttaattaagaaatcttctaaccaactgattgctggaatatcgagaccgttagtaggctcatccagtaatagtacgtctggttcaccgaataaactttgcgctaataatactttaattttttggttgttttctaattcagccatttttttatcgtgtaaagttggatcgatacctaaaccagataaaaggttagcagcatcagcttcagcattccaaccattcatttctgcaaattcaccttcaagttcagcagcacggataccatcttcatcactgaaatctggcttcatatagatttcatctttttctttcataacctcataaagacgttcgtgacctttaattacaacatcaagcacgcgttcatcttcataagcatagtggtcctgttttaaaacagctagacgttcatttttccctaatgaaacatgtcctgtttgagaatctaattcaccagataatatttttaagaatgttgatttacctgcaccattcgcaccaattaatccataacaattaccttctgtaaatttaatatttacatcttcaaatagtttacgatctccaaaacgtaaactcacatcagttacttgtaacatgcattttctcctttttttcattcgatattctaacggaagaattatatcatattatcgtcacagtttcgacctcatataagttgtaatgatagaatgactcacacatgttataataataaagaatacaagaatcgaaggagaataacatggcattagacaaagatatagtaggttctatagaattccttgaagtagtagggttacaaggttcaacttaccttttaaaaggaccaaacggtgaaaacgtaaagttaaaccaatcagaaatgaacgatgatgatgaattagaagtaggtgaagaatatagtttcttcatttatccaaaccgttcaggtgaattatttgcaactcaaaatatgcctgatattacgaaagataaatatgactttgctaaagtacttaaaacggatcgcgatggggcacgtatagatgttggattaccccgtgaagtgttagtaccatgggaagatttaccaaaagtgaaatcactatggccacaacctggtgattatttgctagttacattacgaattgaccgtgagaatcatatgtatggacgtttagcgagtgaatctgttgtagaaaatatgtttacacctgtacacgacgataatttaaaaaacgaagtcattgaagccaaaccttaccgcgtattacgaattggtagctttttattaagcgaatcaggttacaaaattttcgtacatgaatcagaacgtaaagctgaaccaagattaggtgaatctgttcaagttagaattatcgggcataatgataaaggtgagttaaatggttcatttttaccacttgcacatgaacgtttagacgatgacggccaagtcatctttgatttactagttgaatatgatggtgaattaccattctgggacaaatcaagccctgaagcgattaaagaagtattcaatatgagtaaaggttcattcaaacgtgcaatcggtcacttatataaacagaagattattaatatagaaacaggtaaaatcgctttaactaaaaaaggttggagtcgaatggactcaaaagaataatcatttttacacgtgtcgtaggatgcgtgttttttttattcaatattaaatcggacagatgaagtagttttttaaacattcctttcaaagtaaaaaattaaataattcaaacgaataggctgggacattaagttcttaggcaatgtaaaaaagctgatttctattaattatttgatggaaatcagcttttttgatatgtattttataatgtacagctcgttgagctgctattttccttatattaagtgccattaatacaaaacctagctctcgtttaactttatttattcctcgaactgacattcgagtgaaacccaaaatagccttcataaatccaaaaacaggctctacataaatttttctatgactatagatttttttcgtttctggttcagaaagcttttgattaatttgggctttaatgtatttcaaagtaaaattacatgttaatacgtagtattaatggcgagactcctgagggagcagtgccagtcgaagacaggggccccaacacagaagctgacatatagtcagcttacaacaatgtgccggttggggtggctgagacggcaccctaggaagggacccgtcatcaaaaattctatttatagaattttacagtaatgtgacagacgggcaaagcgaagccattcaatacgaagtattgtataaatagagaacagcagtaagatattttctaattgaaaattatcttactgctgtttttttagggatttatgtcccagccatttttgtattcatatttaaatttcgataatttttcaggaagcattttaattttactaatgaagcaatattttttagattaacaaaaattaatatttacattttcttaacaattttttatgtaacatttacagtttctaaaaatgaggttaataattcaaggttaagataaagatgtaatcaatacaaatactatttgttgttcatacagggaggatatttcaatgaaaaaatggcaatttgttggtactacagctttaggtgcaacactattattaggtgcttgtggtggcggtaatggtggcagtggtaatagtgatttaaaaggggaagctaaaggtgatggctcatcaacagtagcaccaattgtggagaaattaaatgaaaaatgggctcaagatcactcggatgctaaaatctcagcaggacaagctggtacaggtgctggtttccaaaaattcattgcaggagatatcgacttcgctgatgcttctagaccaattaaagatgaagagaagcaaaaattacaagataagaatatcaaatacaaagaattcaaaattgcgcaagatggtgtaacggttgctgtaaataaagaaaatgattttgtagatgaattagacaaacagcaattaaaagcaatttattctggaaaagctaaaacatggaaagatgttaatagtaaatggccagataaaaaaataaatgctgtatcaccaaactcaagtcatggtacttatgacttctttgaaaatgaagtaatgaataaagaagatattaaagcagaaaaaaatgctgatacaaatgctatcgtttcttctgtaacgaaaaacaaagagggaatcggatactttggatataacttctacgtacaaaataaagataaattaaaagaagttaaaatcaaagatgaaaatggtaaagcaacagagcctacgaaaaaaacaattcaagataactcttatgcattaagtagaccattattcatttatgtaaatgaaaaagcattgaaagataataaagtaatgtcagaatttatcaaattcgtcttagaagataaaggtaaagcagctgaagaagctggatatgtagcagcaccagagaaaacatacaaatcacaattagatgatttaaaagcatttattgataaaaatcaaaaatcagacgacaagaaatctgatgataaaaagtctgaagacaaaaaataataagacgcaatttcaaatgtgtcttgaaacatgattttgatggtgaatcattatttagagtacaaagcttgatttatcgagacgctgattttgacattcagttagtctacaagcttatcaacttaaaatagtggttcatcattattttacaaatctaattattttgggagtaatagaaagaggtttgattatgacttcatctactaatgttaaagctttaatcgaaaaaaataataataaaaaaggaaagcataatgacaaaattataccagttattttagccgcaatttcagcgatttccattttaacaacactaggtatattaatcacattgcttttagaaaccatcacttttttcaccagaattccaataactgaatttctattttctactacttggaatcctaccggttcagaccctaagtttggtatctgggcattgataatagggactttaaaaatcacagttattgcgactatatttgcagttccagtcgggcttggtgcagcaatttatttaagtgaatatgcaagtgaccgtgcacgacgcataattaaaccgatattagaaattttagcaggaataccaacaattgtgtttggtttctttgcattaacctttgttacaccagtattaagatctttcataccaggtcttggagagtttaatgctataagtcccggcttagttgtcggtattatgattgtccctctcatcacaagtttgagtgaggatgcaatggcatctgtaccaaataaaattcgagaaggtgcctatggacttggagcaactaaattagaagtagcaactaaagtcgtacttcccgcagcaacatcaggtattgtagcttcaatcgttctcgcgatttcaagagcaattggagaaacgatgattgtatcattagcggcaggtagttcgccaacagcttcattaagtttaacaagttcgattcaaacaatgactggatatattgttgagatagcgacaggtgatgcaacatttggatcaaatatttattacagtatttatgctgtagggttcacactatttatctttaccttaatcatgaatttactttctcagtggatttctaagcgttttagggaggagtattaatatggaaacgacagataataatagacaatcactcgtcgatcaacaacttgtccaaaaacatttatcatccagaacggttaaaaataaagtgttcaaactcatatttttagcatgtacattattaggacttgtcgtacttattgcgttgttaactcaaacattgattaaaggggtaagtcatttaaatttacagtttttcactaatttttcttcttcaacaccatctatggctggcgttaaaggcgcgttaatcggttcactttggttaatgttaagtatcattccattatcaatcatcctaggaataggtacagctatatacttagaagaatatgcgaaaaacaacaaatttactcagtttgttaaaatcagtatttccaatttagctggtgtaccatcagttgtatttgggttattaggttatactttgttcgttggtggtgcagggattgaagccttgaaaatgggtaacagtatattggcagcagcgctaacaatgaccttactgatattaccaattattattgtttcaagtcaggaagcaattagagctgtacctaactcagtacgcgaagcttcttacggcttaggtgctaataaatggcaaacgataagacgtgttgtcttaccagcagcgttacctggtattttaactggattcattttgtctctttcaagagcactgggagaaacagcgccacttgtgctaatcggtataccgactatattattggcaacacctagaagtatattggatcaattttcagcattacctatccaaatatttacttgggcgaaaatgcctcaagaagaattccagaatgttgcatcggcaggcattatcgttttactagttatcttaatcttaatgaatggcgttgcgattattttacgtaacaaatttagtaaaaaattctaatttaaacaatcaatctcatttatctattaaaaagggagttttaaatatggcgcaaacacttgcacaaactaaacaaatatctcaaagtcatacgtttgatgtctcacaaagtcatcataaaacaccagatgatacaaactcacattctgttatatattcaacacaaaatttagacttatggtatggcgaaaatcatgcattacaaaatattaatttagatatttatgaaaaccaaattactgccattataggtccatctggttgtggcaaatcaacatatattaaaactttgaatcgaatggttgagttagtaccttctgtgaaaacagctggtaaaatattatatcgagatcaagacatttttgatcaaaaatattctaaagaacaattacgtacaaatgtgggcatggtctttcaacaacctaatccatttccaaaatcaatatacgataatattacttacggtccaaagattcacggtattaaaaataaaaaagttcttgatgaaatcgttgagaaatcattacgtggcgctgcaatttgggatgaattaaaggataggttgcacacaaatgcatatagtttatccggtgggcaacaacaacgtgtttgtatcgcgcgttgtttagcaattgaacctgaagtcattttaatggatgaaccgacatcagcattagatccaatctcaacattaagagtagaagagttggttcaagaactaaaagaaaagtatacaattattatggttacacataatatgcaacaagcagctcgtgtatcagataaaactgcatttttcttaaatggttatgtcaatgaatatgatgatactgataaaattttctctaacccatcaaacaagaaaacagaagattatatttcaggaaggtttggttgatatataatggcaataattagacaacgatatcaggagcaacttgatgatttaataaaagaattacgtcggttaggtgcaaatgtctatgtgagtattgaaaatggtataaaatcattaagtattgacgatagaggctttgcacgacaaacagttaaaaacgataaacatatcaatcaattaaattatgatattaatgagcgagttatcatgttaattacaaagcaacagcccattgcgagtgatttgcgtatgatgatttcttcattaaaaatcgcctccgatttagaaagaataggagataatgcctcgagtattgccaatattcgattgcgtacaaagattacagatgattatgtgttaacccgtttaaagacaatgggtaaattagctatgttaatgttaaaggacttagatcaagcatttaaaaagaaagataccgtattaataagagaaataattgagcgtgatgaagatatcgatgacttatatagtcatattattaacgcaacgtatcttattgataacgatccatttgtcgctgcacaagctcatttagcagcaagacatttagaacgtattggtgatcatattattaacatcgctgaaagtgtttatttttatttaacaggtacacattacgaacaataacttaaagttattactataaaatcccttacgataaatatatatttctattattcataaaccctcaaaaaaaccaagattctcacaattagtaatgtgaaaatcttggtttatattgttctactataaattgtctcgcatcttagttatttgcttgctcaatttcatctgttaatttttcaacttcatcgactaaatcagaaatatattgaattgtagatttaagtggctgttctgtagtaatgtctacacctgcaatgtttgcaagttcgacaggtgatacactaccaccttttttcaatgtttctaaccaagcatcaacagctggttggccttcatttttaatcttttgagaaacgacagttccgattgttaagccagcagaatacgtatacgaatataatcccatatagtaatgaggttgacgcatccatgttaattcagcaccctcagtcatgtctactgcatctccaaaaaattgtttataaacatttagcattatttcatttaatgtcggcgcatttaaagattcaccttgatctactttgtgatacacttcacgttgataagcagcttctaataaatgggtaaccatattatgataatatgttctagataaaattgagccaataacccaacgcttaaatcttggattatcacttgtgttaaataaataattggccatcaacatttcattcattgtagaaggggcttcaacaaagtacattgatgcttctgattcaagatatggttgatgtttttgagctaatgtaaaatgacctgcatgacctaattcatgtgctaagacaaatgcttcagccattttaccagtccaagaaataaacacatatgaatgtgtaaagtatggacttgcacaaaatgcgcctgtatctttacctttattttgtgcaaaatcaatccatcgctgatcgtatgcttcacgtaacatgtttgtatagtcatcacctaaaacacttaacgcaccgaaaatataattttttgagtcttcaattgaaatctctggttcataatcagggtctacagaaatcttcaagtcttcaaaacgcatgttatctaatccgtgaatacgttgtaaaagtttagcatatttctgcataactggtgccaagtcacgcataatcatatcgatttgacggtcaaacatatcacgcgttacttcttgactatgtaataaataatcgatgactgattcaaatccacgtaaatcagcttcaattttttcttgttgtacttgcatattatatgtagccgcggtagtatgctgatattttcgaatcccatcgctaaacgatttgaaacttttacgtctaaactcaggatctttattatcttcataatcattttcaaacgtagcatagtcgacagggtacgttgtaccatcatgttcaaatgaatcgaatgtaatatctagcatttttgtcgtgccgtataaatcgtaaggactgtttagcgtaggtgataaagttgctaatacttgttctaccgacgcagataattggaatggcttttgttttattaactgtttaatatagtgttgatatggacatgattcttctaattgttgaagtatttcttctggtaattcaagtatttctgactctacaaatgataattggctaacaattttaccgtatgtagtagataatttagcgctcaatacttgtgcctcgatattactagtatctacacttaaacgtagttctgcataattacttaagcgatctaaggcaattaaaatattttctaattcagctaaagcagtattaatttgttcgattgaatttaatgttgttgcatatgtatgatgaaattgatttgcttgttgtactagagcgtcaatactttcataatattgttgatcatctttaaataagtctactaaatcccatgtttctgaaacaggaacatcttctcttaaaggtaaaccttgagacatataatcactcctttggtataatacattcattatacataattttgtctcctaaacgataatgttacgatttccatgtcgcaaggaacaatgatttttctattagtagatagaatattgcttgaaactgactgctattgtttaagtttttaaaaatttataataaaatgtatacaaggaaagtaatgaaataaaaggagaatgaatatgacattattcgatatgcctaattatttatggatcacaacattaataatgattttattaacaatattctgttgcttagttttaaataaatggtttgtatctgcagtaattacatttgttatattaggtgtgcttgcattttttattccaaattttcaagatataaaatatcaaccattattaggatacgctgcatttttagcgattatgagtttattaattagttttctattatggtattttactagaaattggcgtaaagaaagaaaagcgcgtaaattagaaaagcaaattgaaaaatacggctatgagggcgctgaacttcgccgtaaagataaaaaataatattcgacaactatatgcacaaaatcatcgacttttaagttacactgcagtaacaattatttcgaaagagatggaatacagtgctatagttgtttttgttttgacttttttatattttacatggttgacttgattcaaaatattatattttataatgattttgttaaaaaattaaatatacttcaatttctttatggataatactataatgaacgttagttcttaatatgtaagttgcatatacatgcgccattctcatgtaaaaagaaagtgttagtaacttacacaaggagggggactattatgttcataataaagtctatgttgtatagactgatgcaaatgatagttgttttatttgttatttctacacttacattcattttaatgaaattatcaccaggcaatcctgttgataaaatattacatcttgatgtagcacaagtgtcgacggaacaaataaatgcaaccaaagataaattgggattaaatgattctttattggtacagtggtggcattggatgaatcatttattacattttaatttaggaaaaagttttgaatcaaaagaaccggtaacacagatattattcaactatgcacccataacattactcatatcattttcaacattagtagtgtcgttatgcatatctataccgctcggcattatagcagccaaacgatttcataagtggacggataaagtgattagagtgatctcaacactatcgattagtttaccagcgttctttatcggtattattttattatttattgtcacaaatttaatgaatatagatagcgttatactaagtcagtttatattacctgtaatcacgctatctttaggtatgtgtgcatacatcattcgtttagtgcgttctaatttattgatgttattgcaaagtaatatcgtacaagcatcaagattacgcggtatgaatgaacgttatattttaattcatgatttactaaaaccaacaattttgccgattatcccattactagggatttcacttggcagtctaataggtggtactgtagtgattgaaaatttatttgatatacctggtattggttatctattaatggatagtattaaatctcgagattatcctgttattcaaggatgcgtgttatttattggcttcttcgttgttattatcaatacgattgctgatttattaacgttattacttgatccgaagcagcgtttacaattaggaaatccaaaaatcaaaaccaatacaccattgatatcagaaagtagtgaccgtcatgcataaaatattttcaaagaataacctgatattttttgtattcgttgcatttatttttgtggtaattgtactgcaattctttgtcagtagtgaaaatgcaaccaaagtcaatttatcacaaacttttgaacctattagttggttgcatttattaggaactgatgattatgggagagatttatttacccgaattattatcggtgcacgttcaacattgtttgttactgttttaacattaatagctatcgttgtcataggtgttacactaggtctatttgccggatacaaaaaagggtggattgaacgattagtgttaaggtttattgatgttggtctaagtattccagaatttatcatcatgattgctttagcaagtttttttcaaccatctttatggaatttagttatctcaattacattaataaaatggatgaattacacaaggttgactagaagtatagttaatagcgaaatgaataagccttatataaaaatggcacaattatttcatgtaccaacaagaacaatattaatacgtcatttaacacctaaaattataccggctattatcgttttgatggtcgttgatttcggtaaaatcattctatatataagttcactatcatttattgggttaggtgcacaaccgccaacaccagagtggggcgctatgttgcaacaaggtcgtgattttatttcgtctcatccaattatgttgattgcacctgcttcagtcattgctataactattttaatttttaatttaaccggtgatgcactaagagatagattgctgaaacaacggggtgaatatgatgagtctcattgatatacaaaatttaacaataaagaatactagtgagaaatctcttattaaagggattgatttgaaaatttttagtcaacagattaatgccttgattggagagagcggcgctggaaaaagtttgattgctaaagctttacttgaatatttaccatttgatttaagctgcacgtatgattcgtaccaatttgatggggaaaatgttagtagattgagtcaatattatggtcatacaattggctatatttctcaaaattatgcagaaagttttaacgaccatactaaattaggtaaacagttaactgcgatttatcgtaagcattataaaggtagtaaagaagaggctttgtccaaagttgataaggctttgtcgtgggttaatttacaaagcaaagatatattaaataaatatagtttccaactttctgggggccaacttgaacgcgtatacatagcaagcgttctcatgttggagcctaaattaatcattgcagacgaaccagttgcatcattggatgctttgaacggtaatcaagtgatggatttattacagcatattgtattagaacatggtcaaacattatttattatcacacataacttaagtcatgtattgaaatattgtcagtacatttatgttttaaaagaaggtcaaatcattgaacgaggtaatattaatcatttcaagtatgagcatttgcatccgtatactgaacgtctaattaaatatagaacacaattaaagagggattactatgattgagttaaaacatgtgacttttggttataataaaaagcagatggtgctacaagatatcaatattactatacctgatggagaaaatgttggtattttaggcgaaagtggctgtggtaaaagtacgctcgcttcattggttcttggcttgtttaaacctgttaaaggagagatttacttaagtgacaatgctgtgttaccgattttccaacaccctttaactagctttaaccctgattggacgattgagacctcattaaaagaagcgttatattattacagatgtctaactgataatactgctcaggatcaattattattacaacatttatctacttttgagttaaacgcgcaattattgactaaattaccaagcgaagtgagtggcggacaattacaaagatttaatgtcatgcgttcgttattagcacagcctcgcgttttaatatgtgatgagataacttcaaatttagatgttatagctgaacaaaatgtaatcaatatattaaaagcgcaaacgattacgaacttaaatcattttatcgttatttctcatgatttatccgtgttacaacgcttagttaatagaattatcgttcttaaggatggcatgatagtcgatgattttgcaatagaggaattatttaatgttgatagacacccttatacaaaagaattagtgcaagcattttcatattagttatttaagaatgcgataattctagacttgttataaaatatagataaatcaagtattttaatctagacacttatctattttattttctttatttaaaaataataataaaaaggagtatcattaatgggattacttgatattgcaagtattcgttctatagaaagaggctttaattattatcaaagtgaatgcgtcattaacttaaaatcattttcagaaacgcagcatgaggctgaagtaaagggcagtggcaacaaagtatatcgttgttatattgatatggaacatcctagaaaatccatatgtaattgtcctcatgctgatggaagacgagtgatatgtaaacatatgattgcattactctttacagctagtccagaagcagcaaataaacatataatgatgttaaacgaagttgaagaagactatcaattacgcagaaatatgtggattgatagtcttaaagaaatgattaatgatatgagtgaagaagaactccgcgatgcatatttaaacatgttaattgaacatggagaaatggcagaattatttggattagatgaagaggaagaaatgttcgaggacgaattttattaaaatagccactatcgattgataatgattatcatttgataggggtgtttttatttatatgattttaagactttgcaaatagcttgtgcattattattgatgtgtttgattttatcaagtttcaatattgcgtgtgtgtatgcttctgatggtcctataatatagccactactagcatgttgtaacatgacaatatcattgtggtcattaccaaatgctatatatttaacatctgcatcaaatatatattgtaatgcagtatatttgttaatattttgcgctgttatatcaatgttatactcatttgaatggtgaatcatttccaattcttgatggtatttatctagctcgtctaatatagttgtaatttgtgccgggtctatatttaataaaataatcttgattggtgtgtcgatatttgcaacatcaatacaactggccagcttatgtggatctaaacgctcaaaaatcgcgttctcagcgtcaagttgtgcagcataattccaatcatcatcaataatataatctaactcatacttttgaattattttgaagatatgatgatatgtatcagtatgaattggtttgataacagaaatctttgattgctgtgaaatcatagcaccatttgcgccaattaatgtgtgctgatgaaatactgatggtaaaactggcaacaaatcacgaatcggacgtgctgatgcaaatataagttcatgaccatcatgttgtaattgtaacaatgtatcaataatagtctggtcaattaatcggccgtcaaaacaaagcgtaccatcaatatcaaagacaaatctcatcaaatcactccaaacaatataataccatgattatagcataagtaagttatgtgacgatattagataatgattatgatgtagggtaccttttgcgttacacacatataacttcctataatatatattatgtaaactagaatgtgaaattccataaggggacttatataactgtatgtttgtgtagtgtttatgtcagtaagctaaatttacattcatgttatgtttcattaaaccaattactcacgttttggtgcatattaaatcttttatatcgatcatacatctatcatcatttttatttctaaaatacaaactgaatactttgctagaatttgttacagcaatcattgctcatgcattttataaattacaattagacaaatatgacatttgatatcacacacttgcaaacacacacatatataatcagacataaattgttatgctaaggtttattcaccaaaaatataatacatattggcttgttttgagtcatattgaatgaattaaaaagtatactcaactcaatcatttacaaataggttgtgcaattcatatttatatttattgcaatcacttgttaaacttgtcatttaatatatcattattcgaggctttattaaaaaacatataaaaaagagcctatagtatcaataactataagccctaacatcatttacatctatttctttaattttttacgtaatttatccaatgttgtgaacaaccaatatttcactttatgaattggtttatagaaatcccctattaattcttcgatttgtacattaaatccacgtttaaagcggtatacgccataatcttcactgttttccgtaaaatcacctgataaaccatagaaattataacgatcatagccattatcgaagcaatagttaatcataaaccaatgcatcatgtatggtcccataaattgattatatttttctgatgaaccaccagagaaataattcacttcatatgcatttgcaaaataaacgccagaagcaaggtttagaattgggccgtccgttttgctcaattcacttgcattcaataattcatgctgatcatgatcaatttgcttatctaattctgcaattttcttcatttgcttatctgatttgttttctttcgccatcatttgatcacgacgattttctttgtcattcaattcctgttgcaactttaacacatattcatcaaggtcaatatatgctaatggtactaatactttatctccatatgtgtcaataaagttataaaaataatcatctgtttttgatacaaatccagcacgctcttcagtttcacgatataaatctaagaaaagattgaactcatcacgttcaaggaatctgactttaacaccatagtttatcgctttattaatattacgtttacgttgactatcaaatgtctttttcaatgtttcgggtgttttaccttcaaggtttaatacgcccatccatcgtacttggctcgatgtatcatactcagttgtaaagccatgatgctcgtaaccatgtgatttaaacaagtttactagggcatcatttttctcgcgaccttcaaatggcacgatatctttatcatatagatgatataaccaatacggatctaatttaacatataaacattgatgttgctgtaaatatttatctaactcttttaaataataatcaactaatcctaaatctgaaaaatccattactggaccacgattcgaatagtaaacataacttcccatagtaggaattttagagaaaaggcttgctgcaattactttgttattgtcgtctttaatacctaataaaactacttcaaagccatcattctcacgggtaactatattttcttttacttggaaataatgactttccaatgatggattttgtacaaagttgtcaaattcggtaacagttaactctgtaaatttcatgttttgataattcccttcctaaaaaattctgtctttaacttttttaagtgcggtatatgctgcgtaaacaggtttattaattggtttaataaagtcaccaacatattcaataatttcagcattgtaaccttttttgaatttaactacaccagcatcttcagcatcttctgtaaatttaccactaacaccatagaaattataacggtcaatgccatgatttaatgcataattaatcatttcccattgcactgcataacttccggcaaaatgacggaatgcatttgatgtaccaccagcataataaacaacttcaaatggattgataaagaagaaaccagcagagataggtaattcattaccatgttcttcttgtagacgtttaccttcttcaatcttttgctcatttgcatcaagttgttgttgtaagttatctcgcttgttatgtgcttttttattttcaggacgtttttcaatatcctttaacgctttatttaaatctttatttaaaatatcacgctcttcgtttagttctttaatatattcatcaaagttgatatacgctaaaggtactaacacacggtctttgtaatattttaagcgattgtagtaaaatttgtcatcacgatcagcaaaagcttttgattctgacgtatcttccataaatgatctaaaaattggtagttcttcttcagataaaaatcttactttaacaccattctttttaacttttttcgtgtttctttttctaagtccatccatatttttaatgatgtcatctgctgttttatcttttaaatctaacactgagtgataacgaatttgtagcacaggatcaaatcctttatggaatccagtatgttcaaatcctaagttactcattttatcaaagaaccaatcattaccagcattacctgtaatctcgccatcatgattcaagtattgatatggtaaatatggatcgatatgtaggtatagacaacgatgttttttaacatattttgataattcattaaagaaaaagtgtacgagttcttgattttcataatcaatcactggaccgcgatttgaataaaaatacttgaacactttcataacaggtacagcagtaagtaagcaagctgcaatgacctcgttattattgttttttattcccactaaatgtgtttcataaccttcagcaagctttaactcatagtggccaacagtttgcgtgaaatgactgtatggcatgctatctgtaaaggcaccaaactctttagctgttaaatttgtaaacttcattatcattactcctatttgtctctcgttaattaatttcatttccgtatttgcagtttttctatttcccctctgcaaatgtcaaaaataataaatctaatctaaataagtatacaatagttaatgttaaaactaaaacataaacgctttaattgcgtatacttttatagtaatatttagatttttgaatacaatttcaaaaaaagtaatatgaacgtttgggtttgctcatattacttttgtatcatttctattcaattttataattcaccgtttttcactttttcaaacagtattcgcctaatttttttaaatcaagtaaacttaattattcaatgtttgttggatagattgtaaatatttaatgatttcctcacgcgtgttagatttaaatcgcttaacgatttcgctaccaatgacaatgccatctgcaacctcttttatatctgcaacatgttgtggtgttcttataccaaatcctgcgacaactggcacattggctatcgctttaattgactcaatttttcgttttaattctggatgaaacgcaccgttttgccctgttgtcgcattcatcgtcacagtataaataaagccttccgcatgggatacgatatcttttatacgtttgtcatcagtagtcatcgcaactaacgatatgattttgacgccatagtgactaaattgttgttttaaacgctgcgataattcatatggtaaatcaggaataattaagccgtagacaccagtatctcgacatttttcaaaaaacgcttgttctccataatgacaaataatattataatacgtcattaatacatagttacacttaatttgatcaccatgtttttctaattgattgaaaatataatctatcgtgatgccttgtttaatcgcttgttgacctgcttccatgataactggaccatcagcaaccggatcagagaaaggtactccaatttcaattatatctgcaccattttcactcaacaatgttgcattttcaatcaaatctttattgcccataatataaggtataaataatttagtcatttgcaagacctcgctctaccatatattgtctaattgtttccatatctttatcgccacgtccagaaatagttactacaataatatcttctttcgacatcgtaggcgctagtctttcaacataactcagtgcatgtgcactttcaattgcaggtataataccttcatgttttgtaaagttgattaaagcattcattgcttgtgtatcactagcattttcaaaagttactctaccaatgtcgtggtaataagaatgttctggtccaataccaggataatcaagtcctgctgaaatagaatgtgctagttgcacttgcccatcttcatcttgaattaaatacattttagtaccatgtaatacgccaggtgatcctttgccaattgcaagtgcatgtttatcagtatcatcgccttgacctgcggcttcaacaccgtataatgcaacatcatctttaataaatggataaaatgtaccgattgcatttgagccaccaccgatacatgctacaattgcatccggaagtcgaccttctttcttcaatatctgtgattttatttctttaccaatcacactctgaaaatctctaacaatcgttgggaacgggtctggacctaatgcagaacctaataaataatgtgtatcatctacatgacttacccaatattgcaatgctttattaactgcatccgataaagtcccttgaccatcttcaactgccacaacctttgcaccaagtaattccattctaaatacattaagttgttgtcttttaatatcttcacttcccataaagacaacaagttccatatcaaataatgcagcaaccgtagcactagctacaccatgttgacccgcaccagtttcagcaacaagcttcttcttgcccattcttttagcaagcaacgcttgacctaacgcattattaattttatgggcgcctgtatgatttagatcctctcgtttcaaatatattttagcgccacctaggctttcagtatatgatgcagcatatgtaagtggtgtcgcgcgtcctacatactctgataaatagtattccagttctctttgaaactctgggtctgcttttgcctctttataagcttttttcaactcaataattgctggcattaatgtttctggaacatattgccctccatattcaccaaagaaacctaattcatctgcttctgtttgtatttgtttattcattgtctctatctcctttcacaatatttacaattgctgtcattttttctatatcttttcgcccatttacttctatacctgatgcaagatcataaccttgatgtgataatttaagttgattaactgtttgaatattttcagagttaatgcctcctgctatcaaataaggtatgtcttttatgtgcttcaaaatagtccagtcatatgtttgaccggtaccaccatacgacactgagggtgtgtcgataataaataaatctacgaaccctttatatttatttatgttttggattatgttttcatctgcagctaaagctttagtgattttaatgcttgaatatttctttttaatttcctgtataaaatcaatagattctgtgccgtgtaactgtattgtgttaattgacgtattgcttaatacgtgttcaattgttgttaaatcaggatttaccatgacacatactttatcgatatgatttggaacagcagacgctaacttttttatttgggtaattgtttgatgccttttacttttttcataatggatgaaacctatcgcatcaataggtaattgactggccgctgtaacatcctttattgatgtaaagccacaaaatttcaatttcatcatgacttcaccttttgcattttcagttgtggtaaaaattcagatagattgtcacaacgcataagcgcctcacctattagtaagccatcgataccactatgcaagatttttcttacatcagatgcatagtgaataccactttcagaaatataataatgatttgtttttttattttctaaaatagtatttgtatgttccacatttgtaacaaatcgttttaagtccctgttatttacaccaatcaatttagcattaaccttataggcacgttctaattcatggcgatcatgtacttcaactaacacttctagattttgcgatatagcgtagttatataaatctttcaattgtttatcagataagatgttaacgatcaataaaatcatagatgcaccagcttgtttagcaacatcaatttgaagcgggtctataataaagtctttgcataatacgggtaatgttgtttttgtcgtcaatgcttgtaatctttcaaaactaccaccaaagtacttttcatcagttaaaatggacacggcatttgcaccatattggtcataatctgagatttgttgcgataaatctcgttcaggtaagtcattaactgtaggactcttcgatttaatttctgcaataattgctagctttggttctttctcaattgcgtttataaaagattttttattctgaatcttcacacttttcaaggtattaagtttgtcttgataatagccattttgtaaaagtgactgtttatatttaacaatttctgataaaatcgtcatattattcacctctcatttgatggtatttttccaatgcttcaccattatcaatcaatgtagttgcaagttctatgccttctgcgatggtatccactttctctgcaacataaaggcttaaacccgcatttagtaagacaacatcacgtcgacttgactgatctttaccattcaagatattaagggagattgctaaattttcttcaggtgaaccgcctttaaaatcactattcggcgcatgtttcaaaccataatcagtcgcatttaatgtgtaatttttgatttctccatcttcagtcaattcatatatcaaattatcaccagatagtgttgcttcatccataccatttgcaccatgtaaaacgattgcacgttttctacctaaatctttaatcgttttagcaactaactttaactttgtaggatcaaagacgcctaccatttgatacgttaagtgatatggattaattaatggacccacaaggtttaatattgtaggctttccaatcatttttctaactggttgcatatacttcatgattggatatgattcagttgcaccaatgaatacaaggtctttttcatttaattggttaggtgtatcatcaacagttgttgtttgtatgttcatttgatttaacaaatccgtactacctgaatttgaggtaatacttttattaccatgttttataacttttacgccagcacttgctacaacaaaagcaacagtcgttgaaatgttgaaactatttgacttgtcaccacctgtgccgcacacacacatagccccttcataacatggttgatgtggatacattgtattaattaagctacgtacaatatatgttaattcttgttgttggatttctcgctccgaataggaactaagtaattcatatttaatatcagttccaatactaggagaaataagtatatcgattagctctttaatgtcgctttcaagtaatatagtttcagtttttattcttgttagtaatgtcatggttttcatccttccttcactagattaatgaaatttgtaattattttgacaccatagtctgtagcaaatgattcaggatggtactgaataccataatgcggtctttctttatgctcgaatgactgtatacaatctttggtacgtccagtaattttcaattcttctggaaaattgtcagggttacttattaatgaatgatatctcataattgaaaactgttctggtatatcttgatataacagatgttgatgatgcgatataacctttagtgtatcaactttgccgtgcataaccttgtcgcctttaatgacttctccaccgtagtaacaagtcagtgcctgagcccctaaacaaatacctaaaatgggtttgtgttgataggttgatatgattttcattaactgttgatcgtctaatggatgccctggaccaggagatataataacagcgtccaccgattgattcagcacattatcatcatcagggtattgaacaatgacgtcagtatgttgagcaacaatatccactaggttatatgtaaaggaatcataattatctacaactaagatcatgggctcacctccaataagcttttagctttcaatttcgtttcattcagttctttttcaggaatagaatcatatacaacgccacaaccagcttctacgttgatatactgctcatctatcatcatcgttcgaattgctaatgcaaaatctaagttatgattacaatttatgtatccaacaccaccactataaacgccccgtttatgtggatattgttcatatattctttcaattgcacgtaattttggtgcacctgaaacggtacctgttggtaataaattcgcaataactgtcattggcgataaattttgatttattttacctgtgacttcacttacgatatgcataacatgttcatatttttcaataaccattaatttagtaatttttgaggtaccgattttacttactctatgaatatcattacgtcctaaatcaactagcatacgatgttcgctgcattcttttggatcattaagtagttgtttcatattctcattatctatttgtgtcgtctcaccacgttgaatcgtacctgcaataggattagttgttacaatttgatctttgacacttacgaaactttcgggagaactaccgacaatatatggttgatcgatattaagataatacatatatggacttgggttttgtcgttttaaattttgatacagttgaaacgaaagttgatttaaatgctgactagcatgatgcgcatatttgtaaattcttgatggcacaacttggaacatatccccttctgttattttctctttgaaatactgaatcatttcgataaatctttcttcagaaatgtttgattgaatttctttagttttaaaatcaaaatcttgtgtaggcatgaatggttggattttagttaagtcttcgatagacttaataactcgattctcaagatctgattttgttgaatttgaaaattgattcgtcgcgatgatatataactcatctttgtaatggtcaaatacataaacttgttcaaccatatataaccttacatcgtgctgcttgtgatcttctaattgtattgattgcaatttaggaaattcatgtcttactaaatcaaagctacacgtcccaacatatccagatataaatggtaatgacttaagttgctcatcttgaatattatggtagtcttcatttattttagtcgttaaataatggtacggtctttcagtgatttgatacgattcttttaaagtacttactgataatacatcattatctaaagttaaagtgccataaatatcaaaaataacaactgaatagcgacctttagtttgttgttgatttgtactttccaaaatgatcttcttggaatgaagttgtgctaaaacttcgggcgttacatttgcttttatttttttataaaatatatccattctatacgctcctttcaaaaaagcgccagcatccttatcaatataaaggacgctgacgcgtggtaccacctaaattaaccgaatattcgaaatattcatagttcactctttactatatataatttttctgttgcagacaaaacccaatttcattaatctcggtgttagttcacatcatccactaactttctgttgctacctttaattaactactacattttgtctaaataaaaagacaccacataacgcatatacctgtaaggacgcgttaccgtggtgccaccttagttaacataattcatgttcactttcaaaactcattcaattgttttccaaagtccaattcacaagatatggcgtgctaattcccatcacccattagctttctatttgctacgtttcatatctgctactatttctttagaaaattctaattatttttatagttcattatattacataggtcgttcacatttgtcaacactaattgtttactcaattggtgataagcaatatgcatatagtaatttctctgtcgctttaatagaatcaatatgtgttcgttccattgcatgagatgattcaatgccagcgccaaataaaccatgtctgatatccgcaccagcatgtaaagctgctgaagcatctgaaccataatatggatatatgtctactttatatggaatgttatttattttgcaaagattaactaggtgcgatttcaattgcttatgatatggacctgaagcatctttggcacaaatagaaactgtatattcatccgatgcttgaccgtctcccaacgcgcccatatctaatgcaatatattctttgattttcgaatcaattgatgcatttgcaccgtaacctatttcttcgttattagaaatataaaattgcgttgtatgtggtaatattatttgctcttcttttaatttctttagtaattgtagtatcatcgctacgctagctttatcatctaaatgacgagatttaataaaacctgatgacgtgataactgtacgtggatcaaagctaacaaaattacctactgaaatacctaaactctttgtatcttcttctgatgtagttacttcatcaattcttatttccatatgcttttgatctctaggtatttcatgattatttctatatacatgaacacttgtttcatgcagacaaattgttcctgtatatatttgaccagcatcagttttaatttggcaatattcaccctcaatcgcgttatacgtgaatcctccaattaattctattgctaagcgaccatcttctttaatttctttaaccattgcacctaaagtatcaacatgagcagtaatacagcgttgtacttcatcatttttgcctggcactgttattaataacgcacctttatttgttagtgttgtttgataacccaagtcttttgcatatttttcgacaaattgaattgcttcttctgtgtctcctgaaggactattaatacctgttaatgttttaatcatttctaatattggttccattgatttacccctccgttgccattgtgttactatactctttattgtagatgatttatctccgtttatctattaatgctattatcgatttttatttactattgcactgtgtcaacagctcatttacaatgttattattctgaaaatttcgaaataaggtgatttatatgacaacagttttatttgttgggcttggattaattggtggaagtcttgctagcaatataaaataccataaccctaatactaatattattgcatacgatgcagatacttctcagttagataaagctaaatcaatcggcattattaatgaaaaatgtttaaattatagtgaagctattaaaaaagccgatgtaattatttatgcaacacctgttgctatcacaaataaatatcttagcgagcttatagatatgccaactaaacctggtgttattgtttctgatactggtagtactaaagcaatgatacagcaacacgaatgcaatttattaaagcataatattcatttagtcagtggtcatccaatggctggtagtcataaatctggtgtactaaatgctaaaaagcacttatttgaaaacgcttattatattttagtctacaatgagccaagaaatgagcaagcagcaaacacgttaaaagaactgttatcacctactcttgctaaatttattgtaactactgctgaagaacacgactacgtaacaagcgtcgtaagtcatttacctcatatcgttgcatctagtttagttcatgttagtcaaaagaacggtcaagaacatcatttagttaataaacttgcagctggtggttttcgtgatatcactcgtatagctagtagtaatgcacaaatgtggaaagatatcaccttgagtaataaaacgtatattttagaaatgattcgacagctaaaaagtcagtttcaagatttagaaagactaattgaaagcaatgattctgaaaaattgttatcattttttgcccaagctaaatcgtatcgcgacgcactacccgctaaacaactaggtggactaaatactgcgtatgatctatatgtagacattccggatgaatcaggtatgataagtaaagtgacttatatcctgagtttacataacatatctataagcaacttaagaatcttagaagtacgcgaagatatatacggtgctttaaaaattagtttcaaaaaccctactgaccgagaacgcggtatgcaagcattgagtgattttgattgttatatccaataattattaagtctcttttgataaattccatgtattcttagatattattgtgaaaatctattgtgatatatgaaatatttatctttagagacttattttatacgaatcacagttatatattacttaaaccgtatagtcattacattttatgtccagccattaaacctaatctgccgtgttttgtacctgcttctgtaaacgatactgctttggacacaatacctttgccgtatttcaaatgtaattggtctatcgttttagctagacattcgtcacgtttgcgttggtattcatcttcaaacagacttaactgtcgctcatcctcattaataaattgactcaaagatatacttagcgtacgatatagtgcttgtttattacataatttatctgcgaaatgcattactactttataaatatctttttctaagtttgttggatctttcaaagtatattgcttatgtacaccgccttcatcactatagccaaaggcaaaatgtatcgttcttgccactttttttcttgctcgaactctgctagcaacatcttcaattaactcttgcattactacttttgcttcatcaaaatgataatctctcattaatatttgacttttgcatatcgatggattgctgatcttgtgcttttcacgtactttactctgatctatcccattcgcatgtagatgcatatcaacacctaaaataccgaactctttttttaaaaatttatatggatatttcgctaaatctcctatagtaaaaattcctcttttattcaatttggcttctgttcgacgattaataccccaaaaatctcgcaagggctgaattggccataatttcgttggtacatcttgatatcgccattcagctataccattttgactatgcttcgcttcaacatccatagcaattttacttaataacatattagaaccaatgcccacagtacaataaatgcctgtttcttcataaatttcacgtttaagtctttcgcaaaatgcatgtactgtagaactaaatctatgatagctatcagtaacatccataaaaaattcgtcaatactatattggtgtaaatcttcaggtggaatataacgcaatgcaatcttagaaatagcaactgaaacattaagatatttacgcatacttggattgataatgtaaatatcatttctatgtggtatttcaaacaatcgcgaccctgtcttgatgcctaattcttttaatttaggtgtcgcagccaatattacagaaccctgacgcttagtatctgcaacaacagctagctttgtttctaatggatctagccccttttcaatacaagaaacactcgcaaaaaaacttttttggtcaatacatagaacatccctatcttctaataaatgataattatacactgttattcctcccttacttgaatcttattatatacgaacacgtgttctatttcaactattttagaacaaatgttctgttattttgcaaatgaatttttaagtattacatgatatactcaaattaataatgattaggaggtttggatgatgccaatcgtcaatgtaaaattattagaaggtcgttcggatgaacaattaaaaaatttagttagcgaagtaactgacgccgtagaaaaaacaacgggggcaaatagacaagcaattcacgttgttatagaagaaatgaaaccaaaccattatggtgtggctggcgtaagaaagtcagatcaataattcttcataagatgcatgccaattaattctttgaaaacgaacaaggcgacttctatctgagtatgatagaaatcgccttgtttatttttaatcttcatctaaaaagtctttaatagcttgtttatttgtgtttttattaatctgtaatgcactaccatcagtatttgtattgacatcttcgtatgagttcttgattggcacagtcaatgacttaacatctttttcacctcggataccaaaactcaaacctgtttggaaaatccctgaatcaggaatgtttgtattcacatagcctcttaaaatacctgcaacttttggtaatttaacaactgttctaaaattaaccatttcttttttcaatgtttgcatcacttgttgctgacgtcgcacgcgtccgaagtcaccttcagggtcgtgacggaatcttgcataaccaagtaattctttaccattcaacctatggttaccctttttcaaagatacaccaatatttttcgacatatctttttcgacattaattggtacaccttcaggcattaattcatcaatcattttctcaaatccagtaaaatcaactactgcataatattcaggattaattcctaaatttttatcaagtgtttttctaagtagctctggaccacctaaagcgtatgctgaattaattttgtgttttccatatcctggaatatctgcataaatatcacgcatgacagacatcattttcatctttttattgataaagtcatattgaacaaccatgatagaatctgttcttgattgtccaccttgtgctttatctgcaccgagtacaagaatagaaattttaccatcattttttactggtccattaaattgatgtactttaacatctttcgcatgtttcttggcatattctacaccgctattgtaactatgtacaatatatacaactaatgcgataagtaaaattacaacaatcagaagaatgataggtaatttcctaattttcttcttcttttttcgcttaggcgccgaagtgcgatgttcactttgacgtctatattcgttgtcattagtttctttatccatatttacctaccttatatcttcaaaaatagatttttgtgtactataataatcacatattaacgttatataaaaacaattcaaaaagcaagtgatttcttaataaatcgtactaaggtctaatgaaaggatgtcaaaaatgaatattaatacagcttattttgccggaggttgcttttggtgtatgacgaaaccatttgacacctttgacggcatagaaaaagtaacttctggatatatgggcggacatattgaaaatcctacttacgaacaagtaaaatcaggtacgagtggtcatttagaaactgttgaaattcaatatgatgttgcattattctcatacaataagttattagaaatatttttctcagtcattgacccattagatacaggtggtcaatatcaagaccgtggtcctcaatatcaaacagctattttctacactaatgatcatcaaaaagaactcgctgagacttatatcgagcagcttaaaaatacgattaatgctgataaggcaattgcaacaaaaatattaccagcgtcacaattttacaaagccgaagactatcaccaagatttttataagaaaaatccagagcgctatgcagaagaacaaaaaatacgccaagaatacaaaaataagcaataacatttatacttgatgaaactgattggactgataataaaagttaggcgacttaactttagctcatttcaatattaaaatacggtacagataggaaacttaaatattcttatctgtaccgttttttataaatcattctttatagaaaccaaaaaatccaagcgcatcaggcataactgtatacctcttagcacttggattttaattatttgtgacgtattacacgcattactttagaaagtgattcccaaagcgaattatctttacgataaactaaaaagcgtggttcccaattcggattatatttagatttataacgacgtaatccttggaaacgatatagaccgttgaaatgttcaaagacacggcctgcaagtcgttctcttaaatatgaataatgcaattgaccaacgttcgataacgttgccatacccatattaaattttgtataaccttgttctttactccaaagtaacatatgcaagtatagaccatccattaatggtaaatctaactctggcaaccatctaattaaatcgactgaaatggcatcattaaagtatgttggcattaaactacaaaatgcaattacttcattttcttcatttcgcattacaccaattggcgctttagataagtattcttcattaaattcaccaacagagaaatgcatttcctgacgattatctagccataaatcacttacatgttgaagttcatttataaattcagttgaaaacggtggttcaataatttcgaacgaaatattaagttcatcgaatttatttaaagtcgctctaaatccacggcgttttttacctgaagttgaaaattgcgttaaatcaataattgcttcttcacctaatttgaaaaattggttaccgaaattatgatataaaggcatgtgttgatctgtaacttgatagaatataacatcatagcctaaatactcagcgtaattatagaatgcttctaacaattcatcaaaggcattttcatcacctaacggatctccaagaaccactaatgaacttgctttataacgatacattaaaaatgctgttttattttcattagtgaaaaactgcttgtcaccactatatatcaagtgactcaaataattaccgccgtactgattaataatctcctcgcaatcttcaattttagaagaaatacgtactttgctaaattgataatcaaacaaccatgcaatcatacctatgatgatagcgatgattaaaatcgtaagccagaagtaatagcgcaatacagatgtatgcatttcaatcgtataaatatctaatgcatataacgttccagcaataaatatatggttaacatataaaataaataaactgaataaaagcattgcaactatatttctcattcttactgggcgtttcaacctacgtgctctacggaaagctacaataagcagaacaaaaataatagctaaccatgttattaaaatatatgaagcgtaagtgaagaatgtcgccactgtgattaataaaattgaaatcatagcaaagataatggcacgtctactttgcttataaataccaactacattcagtaaaagtaataaacaagcactagtatgaattgccaatagaatataatacgttaagtgatttccatcatataaagcatcgtaaacaatcgttaagttatttacaaaaaagatcatacttgtaaagaatactaaaattgctaatgataatgatggaattttagcaataatatccttttgataagacattaaaaatgacgtaacatctttagcaggaataaagtatttagatccctcaatgtacttcttagctgatgtaccaaattcaaatgatgataaaattaatgcaataattaccggtacaaaatagtacgcaaaacgatatagaagtagcattaataatactttttcctcagggacacctaaagttttaaatcctagtaatacaactaaatcgaaagcgccgaaaccaccaggaataaagctgactaaacctgataatgcagcaatgataaatattgcaataaaggacatgaatgatacatgagcgtcaacaattacaccacagaaatataatacaactgcagctgctaaccattcaacacacgacactaaagtgcagtacaatcctacaaaacgattgtttttatcgggtggtctaaccattgaataaataatgaataatggtaagaaaaatgacactacatataatacccatcttacccatgtaatcttatctaagattaaagatgcatcgaaaacatggaatacaattagcaatgataataagcttaaacctgtcaacattgaaataagtattaaggatataaagtgaactaatttctttttatcatgcgtatagtttttataaaccattgctctaacgcctgcaccaataaagccaccgaaacctacaatcgcattcaatgcattgatgatataacttactcttaaaactttgcctaaggatatatccatttttaaagctctagataaaatcacatcatacattgatagaataacaagcgatgccccaccaccaataaatagtaacactaaggacatacggttaatcttactaaattcaaccaacgtatctttaaagttaataccagataactcccgatacaatgtgattgctacaaaaataaataaagctgtagcaaacgtaatttttaagattgaaaatattttgtttttaacttcctgattcattttttcacatcaattctaattatttctgttataaatcaaaatatatcatataaaccataaaaatagcatatcatttacctttgatttatataacacttttgtcatattgatatctgtattaagaagtaaatagaaaatatttctatctcaaacagaacaatatggttatctatactgattcatatttaacataaagaaaatgatgaatcaatacttatgaaaaatattattaattaacagccgattatgagtgcttcttaatatattaaaaataccacttatttttattttcgacataataatgaagtactaatcaagtggcaaatactcgtttcattatgcatgtgctttataaacggctaaactttcgtaaaaatttataagctaaacatgtgctgataatcataaatgtaactgcccaacattataagcaccataaaaaataccaacaaacatatagtcattggtattttttattacttattcaactattttattactttctttaatatcatattcacctacatcattaccatagaaacgattgtatcgacgtttaaataattggaataaatgagtaactaatacttttaaaatagcatatcccggaatacctaaaataacgcctacaataccaagcaatttgcctgcacacagtaaaatgaaaatgattgtaagtggatgaatcttaagtgttttacccatgatatttggtgaaatgaagtgcccttcaacaaattgtactaaagtccatactactgctaattttaagagcatccacggcgatgttatagcagctattacaatagctggagaaatcgctatagtaggccctaaatatggtacaacacttgtaactgccgcaatactagctaatactaagctatatttcaacccgataaccgaataaccgataaacaacagtataccgatacagaatgaaacgataatttgtccttgaatgtatgaaccaacttgaacactcattttttcaagtagatcatgaaaatcttttcggaatttcggtggcataatattcgttgaaaattctttgaagtgatgtccatctttaagcataaagaatagtacaaatggtgttgtgacaatcacaacgccaatattagcaatcgtttctgcaaacgttgcaattttagacccaaagccatctgtaaattcacttaacatagatggtattttcttaggtaaagaatttaaccaatcattaatttgactataatacgaagagaaaaacgtattatttgctattttatcaatagaattaattaatttttctagatattgcggtgaatttttaactaaactatctacttgcgaaccaataataggtatcaataaattaacaattaacgtaataacacctactacagctagataaataatagaaatacctgcaactcttggtattctataacgttccatcatatttacgattgggttaaatagatagaatagaattaaagagacgatgataggtgctgctatcgtcttaaaaacgatgataaaaggatcaaaaacatatgatactttttcgaaaataaaaataacaatacccaacaatactagcgctattaatgagaagactaaatcattcccaccaacaaacttcatataccgtgattcggtaaattttaaaaaattctttcttatattcttttcattttcattcaattatagattcaccaccacttaaaatattcataagatgttgtataaaaacagtccacttatgtaaaattactaacatcaatgataccatacaaataccctttacagtaacgaaacgcccgtgtaatacacttaatttaggattgattaatcctttcttcaaaatgatgaatgtgtaatgttaaatatataatttcagactcactgatattaacatcaaattgtttttgtatcatagttaaaattttatatgctgtgttatagcaaatcggatagtgatttttaatcatagacacaaaatcatcttgtgcatgtatatattcttttcttcttaatcggcgaattaaaaattgtacgtgccttataaaacgttggtattgtaatgattccttatcaacagttgtcacaaggtctgattcaatgatatctataccttttttaataacattattgatcaaggtcatctcatgcatagataaatcttctgtattagatgcaatatgtaatgcaataaatcctatctcatcttcaggaaaatgtacatctaatgctgcatttaactgatcaatcacctgtttagcaatatgatatgcatcactatataactgcatagtttccataacaaatggattgctaataacttgattttgttttaagcgtttataagcaaatataatatgatccgttaatgaaactacaagttgttttgaatcaacattcatcgcagtattagaaataaaattcaacgaatcaataattacttgtaatacattatcatcagcgatttcaactaaacttttataatgtgctttttgttgctcactttctaatttataaattttctctattgtaatagtttggtcgtttaacgccattccctcttttttgttaaaaccaatacctttaccgattaaaataacttcttgatcattattagtacatactacgacattgttgttcaatgttttagtaacaatatattctcccattatcatcacctatttttctattattaagattatatatcggaaatgtctaacttgaaagtataataatttaaatacttgtgttctattacacgcctatcctatatgatatatcttaatttaatttcgatgtctctcaaagtggaataactataataaaaaaatctgactcccatatttacaaataattctatttatttatatattatctgaattaatactcaatacaaactaaaacgtactattaaattgtgcaaagctaaaacaaatttatattcatctatccaacaatatgtcttatcaatggtatagtctttgcacaccaatggaggaaataaatctcaaccttactatattaatatataatcaaatcttagattaactagtgtaatgatacagatgataattgagtacaaatttaaaaccctgagattttcgctttaatttgaaaacctcagggtttatttgatttttatataatgaatcgttacattaaaaatatttatttatcagagttcttatatttgttagcgccccaagcactaattccaaataagttaatttctaagttttcaggtttaaagacagggttcttgccttcttttttctgcttttgataatctttcatcaatgcaaaagctacattggacagtcctataatggaaataatgtttacaattgccattaagcccataaataagtctgccgtattccatactgtttctgtttttacaactgcaccgacaaagacaagtactacaacaagacatctaaagataaataatattacacggtttgttgataaaaattcaatattagattgaccgtaatagtaattacctacaacagatgaaaatgcaaacagtgtaactgctattgttaagaaaatacctccagcagaacctaaatgctcattaagtgctgattgagtaactgcaacaccttgaggtgcgttatcaccaaatttcagtcctgaatatagtaaaatcatgattgcagttgctgtacaaaccaacattgtatcaaagaacacacctaatgattggattaaaccttgcttaacagggtgtggtacggcagcagttgccgctgcattcggcgcagaacccataccagcttcgttagagaataaaccacgtttgataccttgaagaaccgcagcacctacagcgccaccagttacttgttcgataccaaatgcacttttaataatcgtacctatcataggaacaatttgatctaaattaaatagcaatattactaaaaccataccaatgtaaatgatagccataatcggtacaattaacgaagataacgtagcaatactacgtacaccaccaaatataataatagctgttacgattgctaaaataatacctgtgattactggactaatattatattgcgtatttaacgactccgcaattgtattagattgcactgtgttaaatacaaatgcaaatgtaattgtaattaaaatcgcaaatacgatacctagccatttttgatttaaacctttagtaatatagtaagctggaccaccacggaatccaccatctttatcatgtactttataaacctgagccaaagtcgcttctataaatgcactcgctgcacctataaatgcaataacccacatccaaaatactgcacctggaccgcctaaaacaatcgcagtcgcaacaccagcaatattaccagtaccaactctcgaaccagcactaatcgcaaatgcttggaatggcgaaatacccttcttaccatcttctaaagtttctggacgttctactaaagctctaaacatttcaggtaacattcgtaattgaacgaatttagaactaatcgtaaagaagaatccagctgtcaataatagaccaattaaatattgagaccatattaaatcggtaccaacatggacaaattctttaaaccatccaggtattaaactatcgaaatctttcaaaataaacccctcgcatcctctacatgaatcatgtaccttctataaaattagaccgaattgaaccttcagtaaatatagagatacatcatcatttcttatacaatacaagagatttatattagtttggtcaaagtatatcgctaatttaacgataagtacttggtcagcatttaatataaatcccttgaatttagtcaaaatttaacattactgtattttatcatttaatttcgtgattgcatatagtttttagctaatatacatgtctattacttcaccaaaatcatctgtatctacaatgaatgagccatttgtatattgttcagatttatgaatatcattaattaaaccatgttcttcatttgattttgaatataatgtatattgactatgttcacctgtcactacatgtgcagctacaatacgatgtggatttttctttaattcttttaataaagttattccacgttgtgctcttttagcaacttgtaagattttaaaactaatacgttttaacgagccgcgttgtgtggccatcaatatagtatcattttcagaaacaccttctgtcataacaacgaaatcttcagctttaagatttattgatttaacaccagctgcccttaatccggtatctgatagttcacttgtattatacgttaatgacatacctttattagtaatgacggtaattaattgatctttttcaaagcgcataacactaatcaaatcatcattttctttaactttagtagcaattaaaggtttattaaaacgcgttgttttaaatagaggcactgtacttttcttaatcatgccattttgagtcgcaaaaacataaaatgcatctgtattaaagtccttttcattaaagacattaataaccacttcatcttcttcgataggaactatttgtgatacatgttgtcccaattctttccaacgaatatctgctaatttatgaaccggtataaatagataacgacctttatttgtaaatactagtacggtatcttgcgtatttacttcttgatgtttaagtaaactgtcaccatcttttaaaccaatatcttcaacaccgctagcattaaagctacgaatagaagtacgtttaatatatccatgacgtgtcatacttaaaataacttcttcactaggcaccataacttctttgtcaattttaatttcttcaatttctgcttcaattaaagacagtcgttcagatttgaatttctttttaatttcattcaattcttcttttatgacattcaataatgcatcatggttatcaagaatatgacgtaattgtttgattaatgcttcaagttctttatgttcaccttcaagcgcaactatgtcagtatttgttaaacgatataactgtaacattacaattgcttcagcctgttcttctgtgaactcgtatacttcgataaggttttctttagcgtcacgcttgtttttagagctacgaatcaattcgattactttatctaaaattgacaacgctttaatcaaaccttcaacgatatgcatacgtttttctgcattatctaattcaaacttcgttctatttgcaacaacctcaatttggtgattcaaataactatctataatttgacgaatacccatcaattttggacgaccatcactaatagcgaccatgttgaaattatatgaaatctgtaaatcagagtttttataaagataatttttgattgattcactgttcacatcttttttcaattcaattgctattcgtaaaccagttctatcagtttcatcacgtacttcaacgataccatcgacttttttgtcagcacgtaattcatcgatacgttttactaagctacttttgttcacttcatatggaatttcagtaataattaactgtttacgtccattgcgtaaagtttcttcttcaactttagaacgaactataattctacctttacctgattcataagcttttttaataccatcaataccttgaataataccaccagttggaaaatcaggacctttaatatatttcattaattgattgactgtaatatccggattatcaatatatttaagtgttgcttgaatcacttcagctaaattatgtggtggtatatctgtcgcgtaacctgcagatatacctgtagaaccattcactagtaagttaggaaatcttgatggcaataccattggttcgagtgtcgtatcatcatagtttggaatgaaagaaactgtctctttattaatatcacgtaataactcttcagctagtaagcttaacttagcttcagtgtaacgcattgccgctggcggatcattatcgatactaccattattaccatgcatttctattaagacatgtcgtaacttccagtcttgacttaaacggaccattgcttcgtacactgagaagtctccatgtggatgatattgaccaataacatcaccgactgttttcgcacttttacggaaatttttatcgtgtgtattaccacttgaatacattgcatataaaatacgacgttgtactggttttaaaccatcacgaacatctggcaatgcacgctcttgaataatatatttactatatcttccaaagcgatcacctaaaacatcttcaagtgataaatcttgaattatttcactcactagatttcctcctcatcaaattgatcattttcaagcacttgtacttcagaattatctaaaatactttggtcctcttgcataccaaactcaacatgcttttcaatccattcacgtctaggttgtactttgtcacccattaatgttgttacacgtttagatgaacgcacttcatcttcaacttgtacacgaattaaagttcgtgtttctgggttcatcgtcgtttcccataattgttcagggttcatttcacccaaacctttgtaacgttgtaacgtgaagcctttaccaagttctttttgcaatttattaagctcttcgtctgtccaagcgtattcaactcgctttgttttgcctttacctttttccaatttataaagtggaggtaaagcaataaatacacgacctgcttgaacaagcggtttcatatatttgaagaagaatgttaacaatagcacttgaatatgcgcaccatcagtatcagcatcagtcataataattacacgattataattactatcttcaattttaaagtcagtaccaacgcctgccccgattgtgtggataattgtattaatttcttcatttttaaaaatatcttctagacgtgctttctctgtattaattaccttaccacgtaatggtaatatcgcttggaatttgcggtctcgtccaagttttgctgaacctcccgcagaatcaccttcgactaaatacaattcatttttttcagtgtttttactttgtgcaggtgttaatttaccagatagcaaagtgtctttacgcttgtttttcttacctgaacgagcatcttcacgagctttacgtgcagcttcccttgcttgttgtgctttaatcgcttttttcacaagtgatttagacaattgtcctttttcttctaaatagaatggcaatttgtctgcaacaactgaatcaacagcacttctagcttcagaagtacccaatttagatttcgtttgtccttcaaattgcaataattcttctggaatacgaacagacacaacagctgttaaaccttcacgaatatcattaccatctaagtttttatcttttgttttaagttcattaatacgacgtgcataatcattaaatacacgtgtcattgctgttttaaaaccaacttcatgtgtaccaccatctttagtacgtacattatttacaaaacttaaaatactttctgaatattgatcattatattggaaagctacgtctacctctataccatttgcttcacctgaaaatgtagccacgtcatgcaaaacttcttttccttcattgacataactaacaaactctttgattccttcttcataatggtaatgctcttgacgctctttaccactgcgtaaatcattaagcgttatttttaaatttttcaataagaacgcagactcttgtagtcgttcacttaaaacatcaaaattaaatgatgtagatgctttaaaaattgtgtcatcaggtttaaatgttactttggtacctgttttcttagttttaccttttttcactaaaccagaagatggcgaaccaccgtttttaaaactttgatgatatatattaccatctcgatggatttcaacttcaagccattcactcaatgcatttacaactgaagcaccaacaccgtgaagaccacctgaagttttatagccgccttgtccaaatttacctcctgcatgtaaaacagtaaagataacttcgactgtcggtttacctgatttatgtatacctgttggcataccacgtccattatcttctatagaaatactaccatctttattaattgttacatctatttcgttaccgtaaccattcaatacttcatcgacggagttatcgacaatttcatatactagatgatgtaatccccgtttatcagttgatccaatatacataccaggtcttttacgaactgcttctaacccctctaaaacctgtattgaatcatctgaataattattttgtttattcattgccaatgatttcgcctcctgcaaacgtacgttcgtttttaaaactatacaatagttattcttatataaatcagcgtaaaatgcaagtatcaattaactttcatagcttaattccatatattaatccccgtttttaaaatttttagccgtaatttaaatgaatatgataaaatagtcctaagatattaaaggatgtgtaatatttatgatgataatcgtcatgttactactaagttatcttatcggcgctttcccaagtggattcgtaattggaaaattatttttcaaaaaagatattagacaatttggtagtggtaatactggcgctactaatagctttagagtattaggtcgtcctgcaggattcttggtaacatttctagatattttcaaagggttcataactgttttcttccctttatggttacaagttcacgcagatggccctattagtactttttttacaaatggtttaattgttggcttattcgctatacttggacacgtttatcctgtttatttaaaattccaaggtggcaaagctgttgcaactagtgcaggtgtcgtcttgggagtcaatccgatacttttactaatacttgcaattatcttctttattgtattgaagatttttaaatatgtttctttagcaagtatcgttgcagcaatttgctgtgtgattggctcgcttatcattcaagactatattttattagtcgttagtttcttagtttcaatcatattgataattagacatcgctctaatatcgcaaggatttttagaggcgaagaacctaaaataaaatggatgtaacaattttttgacattagtccatcattgcatatttttttgcagttgatggattattttatttttgcaaaaacaatttttttaacttaaaattcaactatacttagtttttttacaagaacatttgagaccgagacataaatcaatgtcataggctccacaatgttatattagctgtagttaaccgaacaaaatgcgcttataactaggttttttcaattctggtcgggggtcccaacatagaagcttatggaaattcagcttacaataatgagcaggttggggtgggctccaacacagagaatttcgataagaaattccacaaataatacaagttggcccactcccattctgtaataaatataggaggtcattgttatgcaaatagaacttactgatgcagcagtaacttggtttaaaaatgaacttgagttgcctgaaaataataaagtgctcgtgttttttgtaagatatggtggcgaattccaactcaagcaaggatttagtcctgcttttacagttgaaccaaaggaagatgttgatattggctatgaacaacaatatgacgatttaaatgttgtcgtagcggaaaaagatttgtggtactttgaagatgaccacattattgtaaatgtagttgatcacgaagatgaaatttcttattccacaaaataactaaaataaaacgaacttgtttacacattctgatgtgtcctgaacctcggaagttgtactttggtttagcacatctgatgttgtatgaacaagttcgtttttgctatatattagcttatcttcacgctaattacattaatgttaacgtattggctattttttatagattaattgttaatattgcctctccaaacatttacagtaacttataaagaatcaataccatccattatctctactgttttcccttcattattgagcgtttgcactttactataagcttcatgccaatctgggaaataacgatccaaccgtataggcttaaaagtatcttctttaatgcaaatcaattctgtggaacctgtagttgcaagttcacctttttcattaaaaatctcatatttatacactgaacgtaatctcgaatatttttcaacccaagttttaactttaactttttctggataaaaaatagactttttataattgacattgaggtcagtcacaggtgaaatgattccttgtttttccatatcagcataactaaaacctaacttcgatatataatccaaccgcgcaacttcaaaccaagttgcataattcccgtgataaattacacccatcttatcagtttcagcataacgcgcttctatttctgtaatactatatatcattttaagccttctttcagtttaactttatatctcattctaacataaaatacaagaagaggccggccaagaacacaaaggttttgaaccgacctattatatcataaagtttatagaagtatttttgagcactatcaaagtgcctcaaataccgattaaaattttactgtgatatctattttttattgcgctaatttatttcttaaaaccatttgtaaaattccaccgtgacgatagtaatccatttcaacaagtgagtcaaaacgaaccatagcgtcaaattctaccaaatcaccatcttgcttcttagcagtaactttgacgtagtcatgtggttgaacattttcatcaatattaacagaaatttcttctgtaccatctagaccaagagaatcagctgattcaccttttttaaactctaatggtaatacacccatcataactaaatttgaacgatggatacgttcataactttgtgcaataactgttttaacacctaataagtttgtaccttttgctgcccagtcacgagatgaacccataccataatcgttaccagctaatacaactaaacctgtaccatcttctttatatttcattgcagcatcaaagataggcattacttcatttgttggccaataagttgtaaaaccaccttcagtacctggcgctaattggtttttaatacgtatattagcaaacgtacctcgaaccattacttcgtgattaccacgtcttgaaccatatgaattaaattcacgaataggcacttgatgatcttgtaaatatttaccagctggcgtatctttaccaattgcacctgctggagagatgtggtcagttgtcacagaatcaccgaatttacccataacacgtaaaccatttaatggaacaatcgtacccggttctttagataatccttggaagaatgatggattttgaatgtatgttgaattaggatcaaagtcatatagaggttgatcagttacatcaatctcattccataattcgttgttattgtatacgttattatattcttcaataaataattcaggtgttacaacactatcaacggtatctgaaacttctttaattgatggccaaatatctttcaaatatacatcttcaccgtcattacctttaccaataggttcattttgtaaatcaatatcaaccgttccagctaatgcataagcaacaactaactgtggtgaagctaggtaattggctttaacaagaggatggatacgaccttcaaagttacggttaccagataatacagatgtcactaataggtcctcatcagcaatcgctttttcaatttctggtaataaaggacctgaattaccgatacaagttgtacatccataaccaaccaagttgaagcctaaatcatctaaataaggttgtaagccagcatctcttaaatatccggtaacaacttttgatcctggtgctagagaagttttaacgtattcaggaactttcaagcctttttcaactgcttttttagcaactaaacctgcacctaacattacataagggttagatgtatttgtacatgatgtaattgctgctattgcaatatcacctgttttcattgtagcttttgatccatctttaaagttaatttcagctttcttatcaaattcacttttatctaaaccgtgtccttggttgcctgctggagctgttacagaattttcaaatgatgatttcatatcacttaagaaaattaaatcttgaggacgttttggtcctgaaagcgatgcttcaactgttgataaatccaattcgataacatctgtataattaggatcttctttctcaacatcaaagaacatatggttttgtttcaaatattcttttactagcgcgatatgttcgtctgatctaccagttaacttcatatatttaagagattcatcatcaactgggaagaatccgcaagttgctccatactctggtgccatgtttgcaattgtagcacggtctgctagtggtaaatgttgtacacctggaccaaagaactccacaaatttaccaacaacaccttttttacgtagctcttgagttactcttaacgctaaatcagttgctgttgcgccttgtggtaatgaatttactagtcgtacaccaataacctctggaattgggaaataagaaggttgtccaagcattccagcttcagcttcaataccaccaacaccccatcctagtacgccaataccatttatcattgttgtatgtgaatcagtaccaactaatgtatctggaaatgcagttttttcaccatctacatcacgaacatgtacaacacttgctaaatattctaagttaacttggtgaactattccagttgcaggaggaactgcattgtaattatcaaatgctttcgttgcccaatttaaaaactgataacgttcatagttacgttcaaattctaatttcatattacgttcaagagcttctggatttgcatagctatccacttgaactgagtggtcaataactaaatccaccggtacttctggattaattttagtaatatctcccccaacgtcatccattgctttacgtaaagaagctaaatcaactacggctggtacacctgtgaaatcttgtaaaataacacgagaaggtttaaatggcacctcgccttcatttccatcttttccaaactgacttaaagctttaatatgatcgtctgtaattacaaaatcatcttcttgacgaagtaaagattctaacaaaacacgaattgaataaggtaaattggaaactttagtaataccttgctcttctacagcttttaaatcatagtaagtataactttggccattcaagtcaaaatgtttttttgattgctctttaaaatttgcagccatttaatgatcccccttgatacatttttatatttatatgccttgattaaattgtattattatatttattgataaacaactcatcatgcttagaaaacgcttaatttaggttttgactttttaatcagagtatataagcaaaacttatcatacaggtaaggtgtaataagtattttttattaattgagaataattatcaatttcgcgaatgattcaattcaatttttaaacgtattatttcattgagcagaaagaaaattatggcaccaaactttaatatttttttcaatgtcattcttttgatgggagtgggacagaaatgatattttcgcaaaatttatttcgtcgtcccaccccaacttgcattgtctgtagaaattgggaatccaatttctctttgttggggcccatccccaacttgcacattattgtaagctgacttttcgtcagcttctgtgttggggccctcaccccaactcgcattgcctgtagaatttcttttcgaaattctctgtgttggggcccctgactagaattgaaaaaagcttgttacaagcgcattttcgttcagtcaactactgccaatataacttcgtagagcatagaatattgatttatgtcccagcctgagttaattttctataaaagtatatttaatttgcgtttataccgtcaaacttcactttagctttgtcaaacccctttctattaagttttcagaaataaacctatcttaaaatataaaaaaatcgagaattcgtagtttaataacgaaattctcgttcttatccttttgaatatactcaattttccacaaaaacaaacaagtagtatatctgttctagctactagaatgacatactacttgttattaaaatacttaactaaactttattagttatcttttttctctatatttctacgtgactgacgcttttcaagaatgtcagattcataatcttcttgttgactcttgatatattcttgtaagcgatgtttattcggagtcaatgttaaacctaggaatttacgttcctggttcgcatccttgtagaaacttaccatcatgagtatgacgacaaaggagaatgggaatgcacttataattgcagcactttgaatcgcatttaaagcttcagcgccgttaccgccaccagctaataaaagtacaaatgctattaaggcctgtgaaattccccaaacaacttttaccatactagatggatttaatgaaccaaatgttgtttgcattcctaatacaaatgttgctgagtcagcagatgtaataaagaatgatgcaattaataataatgcaatcaacgataaaacaatgccaaatggcacatgattaaacactccaaatagctgtgtttcaggagtcatatcaaaaatttctttgtgtttcttacctgtctcgatgcctaatacaccaaagacactaaaccaaacaaaactaacaattgctggaactagcaagacaccagaaatgaactctctaattgaacgtccttttgaaactcgtgcaataaacactccaacgaatggactccaacttaaccaccaaccccagtaataaagtgtccatgaagacatccattcacgtttttgaggatttaaagctgctgtatcaaaactattaaacaagaatgtgtttagtaaactacccgtagagctagttaacatatttaaaataagaacagttggtccaacaattaaagcagctaccattaaaatagtacctaaaccaatgttcaagttacttaagtattgaatacctttacttaatccagaccatgcacttgctataaataagatagtaacaacaatgatgataatcgcttgtacaaacgtattgtttggaacattgaacaagtaatgtaaaccaccattaatttgtagagcacccatacctaacgaaacggctaccccaacgattgtcgcaaatacagataaaacgtcaataaaaatcccaataggaccttctactttatcacctaaaagaggacgtaaagttctagataataaacctggttcacctttacggaattgcgaatatgccaacgctaacgcaacaacaccataaacagcccaagcatggaatccccaatggaaaaatgttgaacgtagagcttcagtataagcttcagtagttttgggatctgctgtaggtggcgtagcaaagtgcgccatcggttcagctgcaccataaaacaccaaacctatccccataccagcactaaacaacatagcaaaccatgaaattgtattaaactcaggtttgtcatttggtttacctagtttaagttttccaataggactaaaaataaggaatatacagaagaacacgataatcgtagtaagaataagataataccaacctaacttttctgtaatccacattttaatattattggtaacatagttgaattgttcaggtaaaaatgcaccaagtaatacgactatagcaacaacaattgcactatagatgaagactggtgaatacttctttccatttggattctctggtgaagaagaattcataattaattactcccttcaattctatatttaattttatgtagtagaataaaaatattatctaaacattttattcaataactcacgcacctttataggataacaaaggtctttgcgataatcaaattttcttgaataatctattttctaatttttttatttgttgtataattgaggttacatttaaaaaagagaggttgagtgtaatgttaaaagaattcaaagagttcgccttaaaaggtaacgtcttagatttagcaattgctgttgtgatgggtgcagctttcaacaagattatatcttcattagtagaaaatatcattatgccattaattggtaaaattttcggatcagttgattttgctaaagaatggtcattctggggtattaaatacggtttatttatccaatctgttatcgactttattatcatcgcgtttgctttattcatctttgttaagattgcaaatacattaatgaagaaagaagaagccgaagaagaagcagttgtggaagaaaatgttgtgttattaactgaaatcagagatttattacgtgagaaaaaataatttttaaataaaaagagatgggctaaggttgttctatacattccaaagtaccatctctattttttatgttttaatttcttttgaatcttgttgaactctgatattgatctgatttcacttctaaaactaaaggtattctatttttcaattcgctcacatgtgaaataatcccaaccattctaccagttgatttaagatttaataaagtgtctaacgctgtttcaagcgtttcttgatctaatgtaccgaatccttcatcaataaatattgattctagtgaaatacctcctgattgctgctgtacaatttcgcttaaccctaaagctaatgcaagcgacgattggaaagtttctccacctgataacgagctaatatgtctagacttatttgaatgcaaatcaaatacatcaatttctaggccactaagaccatgagaaaccgcttctcgcctaattagttggtatcgattatctgacattgttgctaatctcagatttgcttgagcaataatttgatctaaatagtaaattaagacaaagttttccaatgtaagatttttgttattcttaccactgacaatttcagccaattgaaatatttcttgttgatcctttaattcttgatttaagtaattaatatgcgaaactatagattgtgttttattaatattattttgacattgataatgaacagcagagtattcatctatcagtgtattcatctttcctttttttagctcatattcatcttttaatttatcagagtccaataactctttatccttagttaatgattctaacctagctatttccatttcaaattcatgataacgttttttataagtatcccttttctgctctaattcctcttgctcgcccctccaggctattatttcatctatatcattgtcatcagttaaattcagcctcgacatttccatttcaatagactgttcattcaattctaagtcattattgtaagtttctagttgattttcataatgatttagattattttgctcaattaactttctttgagacaattgcattaacttatcttcaatctcctttgagagttcttgatgctgattcacatcttgaacatacttcttataatccacctcaaaattagtgatattattatatttcgagagtgtttcaaattcagtgatgagatctcgacataatttcaactcagattcatttttatttagacgcaattgtttattatgaatttgcaacgttagattatctttttcttctttcatttgttctataaatttattaagatctctttgattattcaatgcattttcattttctagcagacgcttattcaatacttcaagtgaaaaatcactttgcgttttaatattaatattcgatattttttcattaacaaatttaatttcagaattatgcacagcaatattcgattttatagcgtggatatttgcttcaatttctttaatttcattttgacgtttagcaatactgtcaaaatcaatatgatgccctaaatcctgaatttcattaccacatatcggacattgatctccaatatttacagcagatttaatttcacttataaagctttctttatcatttaagtccaattttgttttatcgtagcgatctaattttatttcgagattcttcaatatagatgtttcttcattaatttgattctctaactcttgcttactacctaatagtttatctaattcagctttagctttttcattttctttaattatattaatttcattatttatgttcgttatcgtattatttagttcgataattttctcgtaatcactttggttattacctattgaatcttcgaccgtttctaaacctttaattagatcatttaattcatcacctaattgttcaccctcagttctcaagcgttcaatattgagataactttgttgatacttattaatatcgttaaataatactctagttttatcaataaaagagattttactttcaattaaatctccattttcttctaacatttttttctctttgtctatgtttcgcttatcacaatcaagattcaatattttattattggttttagaaatatcttttttgctattagcaattttagtttcaattttttctctattttcaatataattcaataggtttgtaatatcttgtaacaactttaacttagcttcaattccctctatttcaggttgttgttctttcaattgaacgaaatcaattttatttttgttgagttgattaatattatcttttaatatattattttctaatgttttcttttctattatttcaaattctttaatagcaatttctttactttcatttacagatgctagtatttctttcgacctagcttgtaaaagtggtatattttcaatcaatttgtctatctgttgagtggcaacctctaataagccttttatattgtcatcatcaaatgattcaatttcttgccataaaaggtcaatttgttgatatctattctcgatttgagctttttctttttttacttcttcttttaatatttctcgtatagcttcaaatttttcactgtcaaacagtgttcttaatatcccttgcttttcacgactgtttgatattaaaaagcgtttgaattcaccttgaggcaaaataaacaattgtcggaattgatctgcatttactcctaataattcaataatgaattgggtacctgaaattactttactttctctaatttcatacttgccatccaccatctcaaatacatcaaatttagcgttcgtttttgttgtattaccttctttgatataagggccttgtctatgcactttataaattcgatgatttaattgaaattcaaatgttactgacatcggctgtttaccatcagcgaaatgacttctcaaatcattttcttctctttgttcagttgatgctttaccaaacaaggcataagtcattgcatcaaaaatcattgttttacccgatccagtcttaccacttattaaaaacaattcattattatcaattttagaaaaatcaatttcttcttttaaaaaggggccgaaattattcaactttaaatgtaatggtttcattcattaatcctcctttctcaattcgttttctaaaatattttttatctttttagattggatatccgataattctttatcagttatatgtttataaaacatttcgataattgacatgtcatctttttcacttatttctatagcattattttcttcattgtaattaaaagtttcattcgtcagcgctaaagtattaggataaatttgttttaaactcatcattggatcagtaatatgagacatatttttaagtttaaaatgtaaataattatctttatttttcacatgaactttttcattaataacatcattatattcgcctgagataatttccaattgtctaagtggcttaagaggaataaatacatcgttaataatgccatcattaattgttacacgtctataccctttagcttgacccgcttccgaaaatgaatactgcaataaggagccactatatttaattttgtcgtcttctatactaaatggatgatgcaagtgacctagcatgacataatcaaatatatcaaaaacacctttctgaactgattcaaccgttccaatagttaatggtctttcagaatcagatgtctttccaccttgaacagtcagatgactaattaaaatattgacggcatcttcatcaatttccggtgctattgtttcaatacagcgcgtaattccctgttgatgtgtttcaatggtgtcatcttcaaagtagtgtttcatttcgctcacagtagcataagggagtgtataaaaattaaccccatttatctctattggtgaattaatcgatgtaaaatctgttcttataaataactgattatgttcaaaccaactcgccccatagtttaacctctctttaccatcgtgatttccactaataataattattggtatacgcagttctaaatttaactttccaatcgcttgttctaataacatgattgcatctttacttggatatgttgtgtcatataaatctccagctatcacaatgatatcaggttcttcttctttcattttttctacgaacatatctaaaatatacgcttgatcttctaaaagctgtttgccatttaatattttccctaagtgccagtctgctgtatgtataattttcattactgcctccatatagaacatttgttcgcttttattttaatataatcatttcaccttttcaagtaaaattaaaaccactcattgactgatttagaagtcgatcacaagtggttttaaaagtaattaattgattaatgttttctttagttttttgtatttatatagcattgctgctctccaaggaacaatcatacagaatgctaataaaaagaacatgccgcctaattctccaggatctatttcattactaatgaatattttcatcacagtacgaatgataagtaatgaaatcaaaataactggaaatgctttagatcgtttcatataaatttctgtacctttgacttcaaatcgagaagtccaaattagaactgtagaaaaaagcaaaccaattataaaggcttctagcatttccgatcctgttagcctaaaatatggaacgacgtacatcaatgcaccggtcgccataaaaaacggtggcaaaactatttttttctcatttaccggataattttgagctttcatacgaataactataactatagttcccataaataaagctacaatgattgaaaatattaaatagagcacgcagacaccttctcgttaaataaactctctgtaaatcatacaaaatgaattatagcatttctcagtctattcgtcattttgttaactttaattttaataaacatatttattcttattaatttgattataaaaagaggccatttccatatctggaaaatagcctctatcaattgcgaatttactttttcgcactcttcatattttgatccatatttttattcatcatcgtcatcatttgattaattttcttctgagaaggtttttgacccatttgcatcatcatcatacgaagcatttcttcgttgattggtgggtttttcttcaagtagtccatcatatattttctagctaaaaggaaacctccaattaaacctaaaattaatgcagctactataaaaataattgctaaccaagttgccattgtttcacccgctttctttatcctactgaattttactaaattcatcacattatttcaagaactagtttattcaagtattttaatatcgatactaaaaataatatcaaaaatcatgctgttataacagagcttttaaagattaatctgaaatagtatactttcataacttatcacttatgatgtagtttaagtgctatactctaaatttcaacactttaaaagaagcctaagattatgcatcctagacttctaaacatactcgctttataaattattcttataagctcataacttggtttaagatattttcttttgtaaatccatatttttcaactactaaatcgccaggtgcacttgcgccaaagccgtcaatagcaataactttacctgcagtacctacatatttatgccatccaagcggtgaagccatttcaatcgcaacacgttttgttacgcttgatggaataactgattctttatattcttcagattgttgttcaaatgcattccagttaggcattgaaacaacacgtactgatttaccttgtttttcaagatctttagcagcttcaactgcaagactaacttctgaacctgaagctaataataggaattctggtgtctcttcagagccataaactgtataggcaccttttcgaacgccttcttcaactacatcttctggtacatctaataccggtaagttttgacgtgtcaatactaatgaagtaggtgtagattcagattctaaggcaacttcccatgctactcttgtttcattaccatcagcaggacggataacattcatatttggaatggctcttaatccagctaattgctcaattggttcatgagtaggaccatcttcacctactgcaattgaatcatgtgtgaagatgaacgttgcatttaatcccataattgatgataaacgtaacgctggttttaaataatcactaaatacgaagaatgttgcaccatatggatgtaaacctccatgtgcagccataccatttacagcagcacccatagcaaattcacgtacaccaaaccacacatttttaccttcaggtgtttcagaactataatcagttgcatcatttacattggatttgtttgaaccagcaaggtctgctgatccaccaaagaatgaagggacagttttactgattgcttgaataacagtaccagaatcagcacgagatgcaccattatgacccagttcaaaacgtggtaattcatccttataatttttaggcaatttaccactaatcgctaatttaaattcttctgctaattcaggatatgtttctgcatatttttctaataatgaattccattgagattcatcttcattagcacgttttaacatagtattttggaaaatttcgtatacctcttctgaaacattaaaacgtttttcaggatctaaaccgtaattttcgaatgttaattttctttcaacttcacctaaaggtgccccatgaacaccattagttcctgctttattcggtgaaccaaatccgattgttgttttaacttcaataatcgttggtccttcttgagatttagctgtagtaatcgctttatcaatttcttctaaatcattaccatctttaactagtaagtaattccaaccatatgcttcaaaacgagcttttgtgttttcagaaaaagctttgtttaattcgccatctaatgaaatatcatttgaatcgtataaaacaactaatttacttaatttattatgtccagcaaatgaagctgcttcatgcgatataccttccattaaatcaccgtcagaagctaatacatatgtgtaatgatctacaacattatatccttctttattaaatttccctgctaggtgatcttctgctaaagctaatcctactgacatagcaaaaccttgtccaagtggtccggtagtaacttctacaccatctgtatgtctgtattcaggatgacctggtgttttagaaccccattgtctaaattgctttaattcttctaattctaaactaccagaaacatgtaacaagctatacaataatgctgaaccatgccctgcagataatacgaaacggtctctattgaagtaatctttagattgtggattaaaattcagatgacgtgtccacaaagtgtaagccattggggcagctcccataggtaatcctggatgaccagaattcgctttttcgattgtgtcgatacttagtgcacgtagcgtatcaacagctaattgatctttttcattaaacatcttgtgtatcttcccttcttcaattttatcaaatacattataacttattttaaaataaaaagataagtaaaatacttatttcaagttataatgtcagaaaattctttacagatttgtgatttaatttttattatctcttttttgttgtatctctttaattttttcaggtgttacatcattaccttctggatcaattactttagtattttcaatttgttgtttaaacccttttctaaaactctcaagataagcttttcttaaggctgtttgctcctttgcttcttcttgagttaatcctacttcttttttctttttagctaactcgttaattctttcgatattcaaatcagaattactcaattaaaaaacctaccttcaatttgtttattcaatcattataatactttaacaaaatataacaaatttaagatcagcaaaaaagtaataaaaaacgctatttcgcaaaaataggcaaaataacgttgtgacaatgtatcaatttattaaagcgaacactttcccatctctttgttcgctattgtttgtagggtctttatgttcgtatgctttatttatcgtattgttcttaatttgatggtcagtcatttcgtacacttgttccgagtgagcactaatgttcgcacttaacaagaatattgcaaaggctgcacttgaaactaaaaatatgatgatatatgttgatacgtttttatatttattgtaaaacatcattttcactcctagaacatttgtttgtattagtaatttatcagaacttatgttctgtgtcaatattttaacgaacaaatgtttgttttggtttcaaattaatgatatactgtatttaaattaatttagggagtgcctatatatgagagaattaacaaaacgacaaagcgaaatatataactatattaaacaagttgttcaaacgaaaggttatccgcctagtgttcgcgaaattggtgaagcagttggcttagcatccagttcaactgttcatggtcacctttcacgtcttgaagaaaaaggctatataagaagagatccaacgaaaccacgtgctatagaaattgtaagtgatcaaacaaatgataatattaatatggaagaaacgattcatgtgccagttattggtaaagtcacagcaggtgttcctattaccgcagtagaaaatattgaagaatattttccattacctgaacacttaacatcgacacacaatagcgacatattcatattaaacgtcgtaggcgacagtatgattgaggctggtatattagacggagacaaagtaattgttcgcagtcaaaccatagcagaaaatggagacattattgttgctatgactgaggaagatgaagcaactgtcaaacgcttctataaagaaaaaaatcgttatcgattacaacctgaaaatagtacaatggagccaatttacctagacaatgttgctgtaattgggaaagtaattggtttgtaccgcgaaatgtaatattttaaaccgttatatattatcgtaattgttaagccctcatttttataaattttggacctcttgaaaaagttacgttttcaagaggttttatttattctaatctaaattcagttcaaacagaaattgcgaattgttagataatctcattctttaatataaattttgaattacagatttctgcaaaatgttacacaaattaaaactcgcccccgtaataatttacaggagcgagccattattatttttttctttcttttttattaagtatatctttgacgcgttcaagtatatccgcatcttttggtttatctgttgtcatcatgtttatctacttccttacagacaaacattaccctttaatctcatgccaaaaacattaaccagtataattttctgtccaaaaaggttgtttttcatcattaaaatcaacaccaacacctaatattttaaacgtatcatttaaaatattttttctgtgaccaatagaattcattaatccttgatgtgcatagatactactaacttgaccatatgctaaattctctccggctgagttaaatgtaataccatcttttttcaatcgatcaaatggtgattgaccttttaaatttgtatgatcaaaataatgattgttggccatatctttactatgcttacgtgcagtttcagaattctgtttagaatacttcaatgtagataattgatgttgttttctttcagcattaactaaatcaaaattttgtagttcaaaactatctgcaagcgatttcgatggtgctccatattgttcttttaatctattttccatagcatcacttacttgtaaaacagctgttacattattacgtcgatgcttatcataaaataccgtcgtataaatgtgatttttatggaaaacatcatattctttattattttgttcgtaacgcactctacctttaacaatctctgtttctggttcgcctaatctttgccttacaaccgatttaggtgtattgtatttaatttttgattttgaagtgattatattttgatttgtatataacgcattaactttatctttcatgtaacttatcattataaaattattgtaatcgtcatcataatacgtataccacttcgtaccatattcattaaatgtcactctttttggtttatttaatgttttctcaacatctgatttcgacatgttcatttgtatattattaaaggcaaattgttgtttcttcggtgtatccaatttattttccgcagaaattgtttctttattgatgtgaatgtcaatatattgtcttacttcattttgtaaatgaatgaatggtttaaattctgttattggcgcaatgataataattgataaaaacgcaacaacagttactatgaattttttaatttacatcacctactataaatattaatctctatcaccgttgaaaatagagtttctaacaataacataatctacagtacgtaatgatttcaagtcttttccaccggcatatgaaattgagctttgtaaatcttgttgcatttcttttaaggtatccattaatgaacccttatgttctacaaacatttttttaccttctacatttttatgttcgcctttttgaaattcagatgcactaccaaaatattctttatactgtttaccatcaagttctacagtttcaccaggtgattcttcgtgtgccgcaaataatgaaccaatcatgaccattgatgcaccaaatctaattgatttagcaatgtcgccatgcgttcttataccaccatcggcaatcaaaggtttacgagctgctttactacatatgtttaatgccgctaactgccaaccaccagtaccaaaacctgttttaatctttgtaatacaaactctaccaggacctataccgactttggtagcatcagcaccagcattttctaattctctaacaccttctggcgtaccaacattaccagcaataacaaaactatcaggtatatgggtttttatatgtttaatcatgtttatcactgaatctgagtgaccatgcgcaatatctattgtaatatattcggggattaatttttcttgagctaacttttcaataaaatcaaattccgctttctttacaccaactgaaatagatgcaaataagcctgaattttgcatatgttttataaaaggtattcttgcttcttcatcaaaacgatgcatgatataaaagtaatcattttcagcaaaccatttcgctaatttctcattcataactgtttgcatatttgcaggaactacaggtagcttgaattttttcggaccaaattggatagttgtatcacattcagacctactttcaactatgcatttattaggtattaattgaatatcttcgtaatcaaatattttcactttaaatagcccctttaaaaactaattatttttaaatgcaaattaaaaaccgaatgtttccttattaatatgagaaaacattcagtttatagcattcgtatatactgtacattgttttattgatattgtaaatgggctaaagtacgaaatttgattttaccaacttgattttttaacacctggaatttgtcctttgtgcgcatgttctctaaacgcaatacgagacatttcaaatttacgtaatacacctctaggtcttccagttactttacatcttctagttaaacgtgtaggtgatgaatctcttggtaattttcttaacgcttcgtaatcaccttttgcttttaactctttacgtaattcgtaatatttatttactaactcttctctttttctctcttttgctattttagatttcttagccatatatagttacctcactttttatcaaatcgtaattattacgatttatataataacacaatcctcacataattcaacagtaaagtttcatttctttgttaaatcattttctaaaccatcatatttaagattaaagtgtattatcgaacatttataaaacatacccagaattacttcgtacttattaaattccgctttgaaattttaaattctactatattaaatactctttcaagcattcgctaacaaagtgactttataaaatcagtaatctatttccttctataaatattctcaaattttaataaagtaacaactaatataatcatatattgttctaccgatgaaactcaatccattaatcactcttcacaaaaatttcataaaaaagcgagctccccaatataataggtaagcccgctttattttcaaatcgtcgtatttgaatgataagaattacttagtttcacgatgtaacgtatatttgtttaatcttgggcaatattttttcatttcaatacgctcaggattattacgtttatttttagtagtgatatagttacgatcgccacattctgtgcatgctaatgttacgtttacgcgcacgttaaacaccctctcttgttaggaatctttacgatttattatgatatcataaactgctcaactacgcaatatagaaactacatatcaaatttatttttcaaagttttcgtatgtttcatcattttcagtttcaagatcaatagaatttatatcaatacctaatgcttttgcaacacctttaccatattctgggtcagctttgtaacaatgacgaatatgacgtcgtttaacatcatccgttacgccttccattgcatttgctgtatttgtaaaaattctttctttagcgtcctctgattgtaatctaaacaatttacctggttgttcaaaataattatcatcatcttgacgttgattatattcatagccgtatccatcagttgggaatggtggctttttatattcaggttgagaatcaaatttaccatggttatttggataataatgtgttcctccaccttggttattgtcaactacgcgcatttgaccatctctactaaaaggacaaatattttcaataccaacacctttaggttggtttacaggaatctgccaatgattaactcctaatcgatatctttgcgcatcgccatatgagaataaacgcccttgcagcattttgtctggagaaaaatctaatcctggaataatattagttggtgcaaacgcagcttgttcaacatccataaagtaattatctggatttctatttaattcaaactctccaacttcaattagaggatactcatcgtgataccatacttttgttaaatcaaatggattatctttatggtttttagcttgttcctcagtcattacttgaatatacattgtccattttggataatcacctttttcaatggcttcgaataaatcgcgttgagatgaatcacgatctgtagctataatttcagcagcttcttcatcagttaagttttcaataccttgttgcgttctaaaatggaatttaacccaaacacgttcaccagaatcattatacatagagtatgtgtgagaaccgaacccatgcatatgacgtaaatctttaggaatccctctatctgacattaagatcgttacttggtgcaatgcttctggaagacccgtccagaaatcccagttattttgtgcatctctcatatttgttctaggatctcgtttcaccgcacgatttaaactaacaaataactttggatctctaaagaagaatactggtgtgttattccctactaaatcccagttcccttcttcagtgtagaactttaacgcaaatcctcgaatgtcacgctccgcatcagcagcaccacgttctcctgctacagtagagaaacgggcaaacatttcggtttgcttacctatttcagagaatattttagcattcgtatattttgttatatctttagttacagtaaatgtcccaaatgcaccagaacctttggcatgcattcgacgttctggtattacttctctatcaaattgagacatttgctctaaaaagtaaatatcttgcattaaaagaggtcccctaggccctgctgtcatactattttctcggtctgatactggatgcccaaaaacaccagttaactttttgtcttgttgtgacatagtcatccctccacaatttataataattataatttaatacatattataatttaaccccatcaaaattacaattaaacatgctcaagatgattaaaaaatcagaaaattttaattttttcgctttacagtactaaatagttattgaatagtacacttaaaaagcttacaataatgggtatatttaaatagatgggagactaaatatggaagataataaaatgaaccgtagtcttaactcaagacacatttccatgattgctataggtggtgcaattgggactggtctatttgtagctactggtaatatcatttctcaagctggtcctggaggcgctatactcgcttatcttgttattggtgtcatgctatatttcttaatgtcatcaattggagagttggcaacattttatccagtatcaggttcattcagctcttattcaacacgctttattgactcatctcttggctttaccatgggatggttgtattgggcattgtggtcattagttacaagtgttgatgtcatagtagcgtcaaatgtgctttatttctgggacacatttaaatttttccaccccattacttggagcttaatctttattacaattttactattattaaacattttttctgtaaaatcatttggagaaactgagttttggttatcattgattaaagtgttaacaattatcgtattcgttatttttggctttttaatgattttcggtatcttaggtggtcatacatatggatttgaaaactatacaaaaggccaagcaccgtttgttggtggtatctctggtttcttaggcgtattattagtcgccggattttcggttggtggtacagaagtagtagcagtaactgctggtgaatcagatgaccctaaaaagtctatgcctaaggcaattaaacaagtattttggcgtattcttttattctatgtcttatcaattgcagtaattggtgcaattattccgtacacagatccatcattattaagagcaagtagttcaataagtcaaagcccatttacaattgtattcgatagagtaggcatagcctttgcagcatcagtaatcaacgcggttattttaacttcattattatccgctgcaaattcaggtgtttatacaacaggcagaatgttgtattccttaagttcagacaaaaaagcaccccaatttttaagtaaattaaacaagacaactaagttacctttaagagcattattaactacttatgcagtcgttgttattgttattatttatgcaaactttaattcaaatgccgtttttaatttacttgaaattattggttcaatgattatagttgtttggggatcaagcatttggtcacaaatacgattgcgacaagctattaaaaaacaaggtcaagaccctaataaggtcctaccatataaagcacctttttatccattaggaccaatcattgtcatcactacactattattcttgctatttggtggctcagttgaatatattttaaaagatcaatggttaaatgcttttaaaaactttttacctttaatcattctagcgttgatttactttattcataaaatcattcacaaaacaaaatttgtaaagctagaaacaattaatttaaaaccacacgattatgacaatcaaaaataaataaattctcatacggcagatgctttagattatctatagcatttgccgctttttaatggtgtaaagcagatatactttaatatctttttctagtataaagtgtattaactagtattctgtttatattttattattaccatgttaccattctttattttagatattttgcatatcgtgtataatatagataacaataacttttcaggggtgaaattcaatgattggacaaacaaatttatttgatgatgtactaaagcaagatgaaagatttgttattgtagttcaagcattagaagaaaagaacggacaattattaaagagaactttaagggaatatcccggtttaaaccataaacaaatgaatgatttatttatgcacttaaaggaattattttccgaagaatcatttgctgaaaaccaatcagcgttcagtattacagtttatacaaatttagattatactgctgaccaaatatatgctcatgtaaaacgtttcagaggtaagcatgactggacacaaacagctaaataaaatcaagatgcttgcagtgattttaacaattaatgttagattgtcactgcattttttaatgcattcgttattattcagaatgatcaaatttatttatctaccttccgtgactagttaatacttgatttattcaaaaaatatacatttactctattcgtttgatatcattactaatctaaaatatgtatttcaaatcctccatagtataactgaagtcattttcacaaaaataaaaagccttaaccacaagatatcttattcaaatatcatgtgttaaggcttattttaaaatttataacaattttttgagcgcatgtggaataccattttcattatgatccaacgtaacttcatttgcatattgcttaagttcatctgatgcattccccatagcaatagctagacctgcgacttcaaacattgatttatcattcatactatcaccaaaagcaatgacttgatccaccgaatatcccaatttgtgacataacgctttaattgcattaccttttgaaacgtctttggccataaattctaagaagaatggcttacttgtcgtagcatctacattatcattgaacacaccattcaaatcaattctagcttctgtaatattcgctacataatctacacccatgaccttgggtacatcgccttgaatatacgctttgatatcatcaacacgtttcatcggtaaacctgttaattctgcttcaatattcatatactcatgttcgctgtcgtaaataatttgaccatcatgatatgtaagaacgaaaaagcctctatctcgacaataatctacaatttcatcgaaatcttgcttaccaatcgatttacttacttctacttcttcattagtcatgttaatcgttttactaccgttataactaataatatagctatgatgttcaggtaattttaaatctctagcagttggaatcataccttcagtaggtctaccagatgctagaacaacataataaccttcatcttgaattgctgttaaataatttgcagtttcttctgatatcacattatctgaatttagcaatgtgtcatccatatctaaaacgacaactttataatttgtcatatcgcattaaatctcctctctattctgcatttaatactattttacaatataaagcgtctattggtatacaattcgttctttaacaccactgatactaatatcgaccaattcagaatggcatgatactacctgactatttaaagagcgaaccaattccccactattttctttacgactaaatattaaaatagttggtccagcaccactaattacagttgcataggcattatgttgactagcaattgttttcacttcatcaaattcagcaattaaatgctgacgatacggttcatgaaagccatcttgttgcatgagtttacctgctaattcataattgtgctgtgctaatgcacaaatcattgtattactaattgcactacttttaaccgcttcactatgtgttaatttttgtggtaaagcacgtcttgatgcttctgtttttagttcataagttggtatcgttacaatcacatccacgtctggtatgtcgatatgtgcaactgacgtttctttcgagacatcattataatatccagcgattaaaccaccataaatggtcggcgcaacattatcaggatgtccttcgatttcagtcgctaattgtaatacctcatgtttagacagttggatatcaccaaaataatttgcgatatatatagctcctactaaagcagaagctgacgaacctaaccctcttgccaatggaatatcacttctcatttcgatacataaattaggcaagtcaacactatatttagaagcaacttgttgtgctacatgataaataaagtttgtttcgtcagtaggcaattgcttagatgcatcatcatggaaaatatattcccattttgtccctgatgtttcctttacagacagatgcaaaaatttatctaaagccatacctatagaatcaaagccaactccaaggttggctgttgatgcaggaattgttaactccaaaacattcgacatgttataaagctcctttaatataatcgataatgctatctttatcatttggcaatggctttatcggattatctagtagtgaaatagcagtatcaggatcttttaatccattaccagttaaaatagcaactacttttttaccttgaggtaatttaccttgtctatgcaatttaattaaacctgcaatagaagcattactcgctggttcactaaagacaccttctttagttgtcattaactgatatgcttctagaatttcatcatcagtaacactatctattaatccatttgattctttaagagcattagtcgccttatcccaactagcaggattaccaattcgaatagcagttgcaatcgtttcaggatttttaatgactttattttgaacaattggtgatgcgccttcagcttggaagccaaacattttcggcaattgcgatcctttagcttcatgatattctttaaagcctttccaatatgcagtaatattacctgcattacctacaggaatcgctaaaatatcaggtgcttcaccgtctaattgttgtacaatttcaaatgagcctgtcttttgtccttcgattctaaatggattgacagagtttacaagctcgatttcgccactttttgcaatttcttttacaatttctaaagcttcatcaaagtttccttcaatagaaacgatttctgcaccatacattactgcttgcgacaatttacctaatgcaattttaccttctggtattacgacgatagcttttaaacctgctctcgctgcatatgctgctgcagacgctgatgtatttccagtcgaagcgcatattacaattttcttaccttgctcttttgcttttgtcacagccattaccataccgcgatctttaaatgaacctgtcggattggcaccttcatacttcacatataaatctatgcctagtattttagacatattttcacaatgaatgagtggtgtatttccctcgttcaatgttaattttggtgtattttcatttactggtaaatgtgctttaaactcttctactaatccttgccatcttctcattataattaaactccttctactgggtatactttgtcaacttcgtatccatgcttagtgattaattcttccggtgatgattccaatccaactataacagcggcatatgattgattatcgtaatttgcaactcttaatgatcggtgaaatggtaatattgcctttaactcattttcaaaattttcaattgaacctttgacatgattcactactacaaagaaattggatttttctttaatattaatttctgcatctgaatccatcatttcccgtgttttatctgtctttaattcaaaatgtggtggcaatgtgtgtaaatctgattcaaagaataatgctacattcaataaatcactgacaacggcactacctgttgctaaactgcctgctccttttccataaaacatcgtgtcaccaacggcatcaccaataacataaatcgcgttatattcatcctctacagctgctaattgatgctttttatcaattaacgttggttctaccgatgcattaactttgccattttcatatattcccttaccaatcaatttaattttataccccagttgatcggctacattaatatcagttaaagttacgccactaattcctcttcgtttaacgtcgtttaatttaatgacttggttaaatgataaatatgatgtaatgacaactttacgcgctgcatctaccccttctacatcatcagttggatccgcttcagcaaaaccaagtcttttcgcttcatcaagtgcttcctcaaatgtcgtttgctctttagtcattttagataaaataaaattagaggtaccatttaaaattcccataaattttgaaatattattcgcattcaaaccattatttatggcatttacgatcggaataccacctgctacactcgcttcaaactttaaagctacaccattttcttctgctaaatcttctaaaagtttaagatgtactgctaataaatctttatttgcggtaataacatgttttttatttttaagtgctgttcttaaccaatctacagttggttcaattcctcccatgacttcaacgataatatctaatgaatcatcatttaaaatttcattaacatcttcagttaaatgatattggctaatatttagcggtctctttttagatttatctcgaacaagaatatgctttatgacaatatctttatttaatgtatcttgaatttgctgtcggttctcttcgatgattttaacaacaccagatccgacagtacctaatcctaataatgctatatttaattttttcattttatgtacctccgtttgtgcttttgagaaaaacaaatgtattattgaaaaacactagatgatagtatagtatagaattattctttatttttgtaaagttcgtaatattcaaaatataaatacataatatcattcttacttacaaaactgaatacaattttctgattttttagaaaggttggcatgcactatgaaagtttccaaattcggtggtagctccgtctccaatgctactcaaattaaaaaggttttaaatattgttaattctgatccagagcgaaagattgttatcgtttctgctccaggtaaaagacatgataatgatattaaaacaactgatttgttaatcagattatatgaaaaggtcattaatcatcttgattatcatgataaaaaaagagaaattattcagcgttatgatgatattgtaaaagaattgcaaatggatgaaagtattttacggacgatagatgtgactttggaacattatattaatcaattaaaaaatgaaccaaagagactattagatgcattactttcttgtggtgaagattttaatgcgcaattgatagctttatataataatagtcaaggtataccaacaaaatatatatcaccgaaggaagcgggtatttttgttactgacgtcccacaagaagcacaaatattagatagtgcttactctgaaattaaaaaattaagagattatgatgaaaaactaattatcccaggattttttggcgtatctcatgaaggatatatagttacatttccacgtggcggatcagatataactggcgccatcatatcaagtggtgttagagccacaatttatgaaaatttcaccgatgtgtctggtatttataaagctaatccaaatatcatcaaagatcctgaattaatcgaagaaatcacttatcgagaaatgcgtgaattatcttatgctggttttagtgttttccatgatgaagccttacaaccactttataaagatcgcatccctgtggtgattaaaaatacgaaccgccctcaagataagggtacatttatagtgcatgatagagaaataaatgcgaaaaatgtgattagcggtataagttgtgataaagattttaccgttattaatatcaaaaagtatttaatgaatagacaagtcggctttactagaaagatattaggtgtcttagaggataataatatttcatttgatcatatgccttcaggtattgatactatcagtatcgttatgcgttcaaaacaaattcaaaataaagaaacaaaagtattaaatgaaattcgtcaaaaatgtgatgttgatgagctaagtattgagcatgatttagcaatattaatgattgtcggcgaaggtatgaataaagtcatcggtactgcaaataaaattacacatgccttagctgaatcaaaaattaacttaaaaatgattaaccaaggtgcttcggaaatctcgatgatgtttggaattcatgtagatgatgctgaaaaagctgtattatctacatatgagttttgctatcacggggttgcattaaaaaacttgtgtgataaaaactaatataaaagcaattcgtaacacatgtattcaactgcgttatgaattgctttttcttaattatttattgttctctggattgcatccttaatacgttgctcacctactacaaattttaaaataaaaaattgatagtagcttaatgcatctatgactcgtttataattggaataatgatgatactgatggtgttgcattagatcatacattagaacgatctccggtttaatataatccacatcccaatttaaactatggaagtatatgttactcttaggtatacgtatattcggatccaatctaaaaatccattcatcgtttactacatcataaacgaaaatactcattattgttgtatcatcatattgcacataaacttttgcaatttttgaaagtgataaatcttctttagctattgcttgatcttgcttatctatgtatagtaacgcatatgattgcggaataactttcacaatatcacttaaacgcttacgttccacgcatatttcaacaatagaaggtaattttaattcatcatttaagaaaagctgcatggcaacttcaccgtgaaatttaaataattgcgatgatgttttcattaaattgtccactaattgttctttagcattcatttcattcactctcaaatacacctcctaagcaagcgctttcacaaatatcattatacattttaaaattaatgaattcaatcttcaaaatactatgagtgacctaattctgtcatttaaatgaccgttataacataaattcgacataaacttgaattcacgaatctttcacgtcatattcattgaacatcaatatctgtcagtttataatttgattataacaatgatgaactaaaatcaactaataaaaatgtgggaaattgaataacaattaatctttattaattattattgtatacaaagttaaagaagtcaaaaaggattggtgaaaaaatgtctttttatgttgttcttatcattatcattgtagcattaattggtatattagttttaaatcaaaggtatagtaatagtaaaatagataccgaagtttatgcaagaaagcaacttattaaaaagaacaaagcattaagtgcagaaaatgctgaattaagaagtcaaatgctgagttctaataatgatgttggccaccatgcatacaaaaatgctaaaagagaattacgcaagattttagatagctatctcgaaaatggtaaattaaaatattacgatattatcgttacaagcaatttagctactaaacatccgtttttcgagtatgcacgttcatttgattttatcattgtttcagatatcggtttaataaacgttgatgtaaaaagctggggtgaaaaaacattttatcactttgatgtacctgatgagcatgatacagaaataagcaatagtaatattgaaaaagttgtcggtcattacattagccagcaatatcatgatcagtttaattcatcaagaaagtctatctatacttttacagaaacagttcaaccaaatcgtgttatttatgatttttatgattatgatccgtatcaattagcagcaaataatgcgaaagcattaaaggatcatattgaacaaaactttaactttaaagtccaaagtaccggtgttatttactttagtgatggtacagttaatatcattcaaggttctgaagaaagagataaatatgttgatacagtttcaacaaaatcttcgttacgacgtattattagcgaagccatagagctatctaaacaccctttaaataaagaacaggttgatcaaatcacagctatattcaagtaaaatcaaaggcataataatccattacgctcgatacgcactatggttattatgcctttaaattatttctatatataaatttatggtaataataaatcgatgcttcaagtatattttactttaatatatataatcacctatttaattatttactccaaatatttaatttctgttgtttagctttattttgtgcttctataaatacatttctatatttgccatttggtgaaaaatacttctctctagcaagtcccttttccactaattccttattgtacatacgatctttacttatccatacatacgccaatgttctaccatagcgatcttgtttttctttatcatattctaaataaacatcttgatttgttaatgtcttcttactataatttgatgcttctttgccaaatggttgtacaggcgtattcggtttcaccgtttctggcgtatcaacccctataagcctaactttaatttctttaccattttgatttgcaataaatgtatcaccatccacaactctttgaacatgtactttatctttaccatttaaatcttgtacagtttcatgattcgtcccctttttgaaaggacccgtatgattcataaattgaaatgctaatacacctacaataatgatggctaccacaatcatagcaagcgatttatttgacttcatattgccacctacttctcttttttcattccgattaatcatataaaagttaagaaatatcgtcaatagccatatctacatatttcaatattttggaaagctatagcatgatataatgttattgttaaggagtgaaaataaatgaacatttcaaatgaaaatacagtcacattaattgcagtaattatcgcaattatcattggtattttcctacaaatatttttcaaattaccattaatagtgacggcagtactatctattttattgggtatctttgtaggctttatcgtttacttgattgtttcgttttataataagcgaaaaaattagttaacaaatctaaattgcgagtaccaaaataaaagtattgagtaagattttgattattgactcactttccaagtctcttaaatcaaaacactcaatacttttttgtttgtatttagatccagcctttttcatttgcctttttccaagcatcaaaacgattatctgcaaataatttatcaattataacagatgtataatttctaactgttccatctgtcaaaaataatttttcacttatttctttactacttaaaccattgccaatttcccttaatacaatttgttctttgggcgttaatgggtttttatctacaaaaaatgaagtcatcaatgtggcgctatattctttctctccgttatttactttattaatggttttcaccaattcttctatagaacgttcttttaaaacatatgcatccacatcattcacaactgctttttcaaagtatcccggtcttttaaaagttgttacaataatcactttagtattcaaatgcttttttctaatttccgctaaaacttcaagtccagtcatgcctggcatttctatatctaaaataacaacgttaggattatattcttcaataagtttcattgcatcgagaccattatcagtatctgctaaaatttcaaaatcaccatgtagtttaattaattgaaccattgcctgtcgtaacatattttgatcttctgcaataattaaagatgtcatgctattcctcctgttgagatttcaatgattattttagttccatttgttgagtcgactgctaaagttccatttaaatgttgtacacgctgtgaaatacttttcacctcacaatcactatcgatacctttgccatcatcttcaatcataagcagtaatttatgattgtttacagtttttaatttaccatgaacttttgaagcatttgcatgtttaataacattatttatcgcttcacgcgtaatcataactaacatagattgtttagtaggacttaatacttgcgctaattctttattttcaaatgtaaaatcaatatcagcatcttttaaaactttacgtatactatcaatctcttcaataaatgatggtaattttacatcatcaataatttctcgaactttgttcaatgattcacgagataatttattaattgctaataattcagcttttactttttctacatcagcatctattagtttataagctaattctgattttaatgataaacttgcaaacacatgccctaacgtatcatgtaagtcttgaccaattctatgtcgctcttgttcagcaattaatgtattaatatgtctatttttttctgctatttctttttgatattcacggtttttcatttttttaaaattatctagcattattaacgatataacgacataataaaccatcattgcaacaaaatagttgttatacaataagtacgttattattgtacatataatcattgttagtatgaaaagattagttgccgtttttttaacattatttttaaaagtaaatggaacggcaaaagcactataaaagaaaaacaaacttagcattggatgtacactgaaaacaaaataacaaataataaaataatgaataatcaacaaaatgtaaaaagtcaagtccagactcctgtgtaaaatgctatacaatgtttttaccatttctacttatcaaaattgatgtattttcttgaagaataaatccattcatcatgtaggtccataagaacggctccaattaagcgattggctgatgtttgattggggaagatgcgaataatcttttctcttctgcgtacttcttgattcagtcgttcaattagattggtactctttagtcgattgtgggaatttccttgtacggtatattgaaaggcgtcttcgaatccatcatccaatgatgcgcaagcttttgaatattttggttgatcgatataatcatgaatcaatcgatttttagcctcacgcgctaagttaatatctgtgaacttaaaaattcctttaacagcttctctgaaagattttgaattttttttaggaatggtggtaaagatatttcttaggaagtgaacttggcatctttgccaacttacgttggtgaaggattttctaatggcagagactaatcctttgtgcgcatcagaaataacgagttccgtaccttgtaaaccgcgttcttttaggtattcaaaaaatgttgtccaggtctcttcgctttcgccactttgaatcatgaagccgataatttcacggtcgccatctttggttattccaatcgctatatgacagctttttgagagtactcgattttcttctcgtacttttatatagagtacatcggtcattaagtaaggataatttttttctgataataaacgattctgccactcgttaaccataggttctagctgttctgttaagctagaaacgaaggacttagagacggatttaccacaaagttcttccacaatttttgatactttacgagttgaaacgcctgatacatacatttccaacattgaagccatgagggctttttcgtttcgttgataacgttcaaacactgtgggtgaaaaatggccatcacgtgttctgggtacttttaattctagcgtgcctacacgtgtcgtaaagctgcgctcataatagccatttcgttgactttgtcggttttctgttcgttcatattcttttgcttgaatatattctgttcgttgattttccattagttgattaaataccgttgttaaaatatttttagaaacgtcatcctttacagaatattcaataatgctttgaatctcttcgcttttcagtgtaaaatgtacttgggtcatgtaaaagtcctcctgggtatgtttttgtcgttaaaaacattgtaccgtaaaaggactgttatatggcctttttacttttacacaattatacggactttatcatgtaaaacattaatgtattaagtctattatttactataactaatataagatacgacaacgaaaagacaatgactgatataatatacaaccatttgggaccatatacttcattaaaaaatataccggcaataggaaaaatcagataaagtatagacgatatttcagcaattgaagtatcttttaaaaatttcatattttattccgcccttttaaaatgactaatacaatatactgctattatactccctaaagcatacaagagtattatagcaaatgatattaaattgatatgatgatttgaagcaatatctacacctagtttacgcaaatgatagctcggtaaaacatgagcaacatgttgaagccaatttggaaatgtgtttatcggaaaccacaatccacctaatactgctaaaccaattgttacgatattagctaaagcacttgttttttgaatatcatttaacaaagaaaataatatgccaaaagttattaatagagacgcacctaaccataaaaatattcctgactctaaccattgaactgcactcattgcaacacctttataaaaatgtccaaccataaaaataactaatatcgctattgcaaattgcagcatagttttcactacttttgaaatataataactagtaaaagtaaatggtgttaccattaatctttggcgccattcattttgtttttcattaataatatctaatggaaaagttagtaaactaaaacttaacaaactataaaccgtcatactatacatatactctttataaaatttaggtttaacatcttccggcaattccaatatcgaagtaaataatatatagaatataacaggaaataaaatagataatattaatgttgtttttttacgcattataactttaaattcgattttcaagtaacttagtatcataattagatcccctttgctttttattgttgaagtatgaatcaacaattgagactttttgtatttcaatatcatccaaattaatatgaagttgttgaagatataaaatcgtatcatttacatttgaagtaataattttgatagtgccattatgatttttttgaataactaaatcatctttatctagttttaactttcttatatattcatcggataacgtaatctgagattgctgattggttctaatatgtgacgttgaatcattaagtattatttctccattttcaatgagaataattttgtctgacatacgttcgacttcttcaatatagtgcgatgtatagagtatcgttcgattatcttcttttaaattttcaataattgaccaaaaatattctctaatttctatatccatagtcgatgttggttcatctaataagatcaattgtggttgtccgattaaagataatacaaaatcgagtaatcgttgttgaccaccagaaagtttatttacaaattggttcagttgactagaatcaaatttcgtcagttctattatttcttccaatggtaatggattttcgtaaaatgattgatataagttgataatctcaataacttttaattgatctggaaacatcgttttttggaacattatactgcgattttcactttgtaataacttgtctttatcaaatatctcaccagaattagcattaacattaccaattaatatatcaattaacgttgactttccagcaccattttttccaattaaagcgatacatttaccttgttcaatatcgaacgaaatattttttagaacacatcttttattaaatgacttgttgatattagatatttgaatcaatttaatcacctctatttttttcttaatttaatattagtaaatttattagatttaaaatagaacactttgtcatagatttgaaatgacaaatgtcattattagatttacataatatatttatcgttattttaattttgggcaaaataaaaagagcctctataatcgagactccttacaaataaattataaaattggcgaaactaattttgctaacgattctttgaatttaacagacagcggtctattggcatatgattctttggttagttgttttgattttgtaatatcatgttcataagccacccttaaatctttagcaagattttcatcatatacaaaggcatttacttcaaaatttaattcaaaacttctaaagtccatatttgctgtgcccactgatacgatttcatcatcaattaagcacattttagaatgtataaatccattttcatacgtataaattttaacaccacttgataataagtcagaggcatttgaaaatgtcgcccaatatactaatggatgatctggcttacatggaatcattaaatgtacatctacacctgatttagcagcaattttaatggcatttatatatgaattatccggaatgaaatatggtgattgtaaatatacagatttctttgcactcataatcatttttgtataaccgtattcaatttgatgccagtcactagccgggccacttgcagctatttgaattggtgaattgcccaatggtccgttctttttagggaaatacttaacatcatattcaaattgtggacggtgcgcttgcgaattccagtctaaaataaatcgcaactgcagtgcatcaaccgcatccccttgtatacgtaaatgcgtatctctccaatatcctaattttcctaatcctagatattcatcaccaatgttaaatcctccgacataacctagttgaccatcgattacgatgatttttctatgatttctattattcattctgaaattcaataacggtaattttgaagcaaaaaatgcttcaacttctccacctaacgatttaaaatgatcaaaatttgccatcttaacatttttagatccaacatcatcatataatatttttacttctagaccttgtttcaatttttcttctaaagcatgtaaaattcttttacctaaaccatctaaagcgaaagtatagtactctaaatggatatattcttttgcatttttaatatcttttaaaacttgatcatataaatcatttccatcaatgaaatgatcaactttattattttcagttaaaaaaccatcttgatccatcaaaagcatacgtactaaatcatgatgtttttgaacttgtttgttatcagtaccataattacctttatcaaagctttctatttgttgttttaaaagtccatcgaaatccgttaacacgttaccattgtttttattcaatttgcgtgccgaaacggttctaccaaaaaacaagtaaagaataaaaccaatcaatggtaagacaaaaagtacaaatagccatgcccaagttgaactcgctgtacgcctatttctttctaaaaagataataataaaagccaatactaaattaatgatgaatccaatggctaaaataatagtaaataacgttcctaaatcgtttgaaaatgtaaatcgcatagtcttttctcctataaagaaaggcacaaaaaaacattttgcacctttcacgtcatattatttattcacagataaagttaaaattgcattgaattcttcttcattatttgggaatgttctttcttctatttctttaatagtaatatttactaattttaaatttgtagcttcttcagaacttaaaaaagcattaatgtttttttctaataactctaaagtctcagctgtaaaagttttaagtttaatttgttccatttaaatcccctcttttctctatttcctaaatcatagaacttttaacagtaaaattcaatcattaatacatgtgttccagcatgaaaagtcgctgtgataaaaaattaattaattttcataatgtattgtttgatgtataatatatttattcaacttcgcgataatgcgatacaaactttaaccattcataatacattttaaatatcgaactagttttgaaattggtttatcttattaaaatgttgatattagttttagggggaaatgtagtgatttcattcgaaaatgattatttagaaggtgctcatgaaaaagtattaaaacgattagtagatacaaatcttgtacaagcttcgggatatggctttgatcaattcacagctcaggcaattgaaaagattaaagatacaattgactgtccaaatgctacaattcgttttttagtaggtggaacacaaaccaatcaggttgttattaattcaatgttagaaagttacgaaggggtcatttcagcagacactggtcatgttgctgtgcatgagggcggtgcaattgaatatagtggacataaagtaattactataccctctaaggaaggaaaagttagtgcttcagatgttgaaacttacatggagacatttaaaagtgattttaaaaaggaccatatggtattcccaggaatggtatatatttctcatcctacagaatatggcacattatactctaaatcagaattggaagagttatgcaaagtatgtaagcaatatcagcttccattatttatggatggtgcacgattagggtatggattgatgagtgaccaatcagatatgactattaaagacatcgctaaatattgtgatgtattttatataggtggtacgaagataggtgcattatgcggggaagccattgtttttacgaaaaataatgaaccgaaacaatttaccactcgaatcaagcatcacggtgcccttttagcaaaaggacggttaacaggcatacaatttttagaattatttacggacaatttatattttaatataagcagacatgctatcgaaatggcaaataagatgaaagacgggtttaaaaataaaggctatcgtctttactttgattctccaaccaatcaacaattttttattttaagtaacgagaaaatagcagagttagaacaaaaagttaaatttgctgtttgggaaaaatacgatgatcaacatcgtgttgttagattcgcaaccagttgggcgacaaccgaagaaaatttaaataaactattagaattaatctaataatgctgttatatgtcatctggtaaatcatttattaattaattaagatcagttgagtagatgtgtttatttatatatgaaactgctcatttgtagccgttgatgatataaaattacattattccaaaacaaggtactacagattattgagtatcttgttttattttatatatttaaaaatgttaatttgtgctgtatttactttaatttgacgacatttgagaagtattatgatggttgtagttattttatgaaagtaatgtattaacaatcgaattactaagtctatattggtaggaatatcgatgtttagtttaaatggaatgcactatttaagtttttaatatggagatgtttgtgacttttcgatgattaagatttttataggtgtgcatcatttcaaataaactttgtgtttaaaattgagcttaggaaatcgataggtttagatgaggatattgttgaagttatgtgtcttgtatccttagttgttataaaagcgcaaaaaatagcaccgctttctctttatctgtgtagaaaggatgctattattgtaaaacaatagttttaattttattttctgatatatcatatgtaattctacctgtatcaatttctatcgaattataaccatcaaaattatcaactttatcatcaaagtctatcacttttccaattaatattttattattagtaagcgttaatttgactaatttgcctatgtatgactgtaaattcatatttaatcactcctttttaatatacggaactacatgaaaaccagttttagaataatgaaccttacctaatttcgtttcaatatatttaccattcacataagatttacctattatctttttataatctataacttgttttattctaaaattcccttcatcatcaaacaaaactggaatatcaataaattcttttttagtcatcttttcactttcattagaatctattatagtataacttggtaataaagatgaattatttttcttattattatattcatttgtgcataaaatatgacgcttttgcttaacattattcaatttcatcgtcattttaccattacttatcatttcaagcatttcttttttagctttttgtagaaaggatgctattttgtaattattttaataatctaatactttttatctcagtttcatcaaacgaataaacagcaaaatcagtctgtatatctacaacaagatttcctgtttcgctctcgaattcattttcatagtcagttacaaacccttcgtattcttcattattcaaaagcgtgataataacatctttacgatatgcatcttcaattctcaatacttttcacctacttatcaatataaggtactatatgagcacctgtcttcgaataatgcacttttccctttctggtttcaatatacacattttcgatatgtatttttccaataatttgattaaaattaataatctctttcaaatcaaatcgctcatcacttaatattagattgcctgttgacattttttctcttaacaattcattcaataaatctatagaaagtattgtatagctaggcaatttcttattatttaaaatggctctttttttattttcattatataggtgatgacctaacatatatctattttatttttccgcaatttatttctatttttattttaccatttttaatcatttctttcatctggtttttagctttttcctgtaattatgcttcttttacttctacttgatatttaccttcacgctctttaaagaacttgtcccgccaattgccaacatgtggcactgtggtacttctacaccaaggatgcataggtggcgcattcacacctggtatcatatctttaactttaaatatttttccgttaagtgaatgacataatttagatgttttactatctattttggcaacatatttatattcgccatcttcaccaagttcttttaaatatgttaacttttgtgcttctgcattttcagtaaatagttaaaaaagcgtataaaaatagcaccactttctctttatctgtctaaaaaggatgctatttatcttttgaatttgaattctttttcgctttttctatactttcaaattcttcaactaattctttaaaagattcactcaattcttttgcagttacatttccatctaattgtgaatctaacataattaaaatcatctcactttatatttaatcatatttatactataaagttttttcaataatttttcaatatggctatcattaatgatattaatatgcgtaaaatatttagcacaaaatttactcactattttaccatgaaacctatttgacttggtaataaattttacttgtcccttattagtaacgattgtcattgattttattgatggatgcttaaaaaatgtaaataaatcatattctgaaaatcctgactgtccaggatggttatgtaacataacaattgaattcggtttactgttaaataataattcggttgcttgttaccctggcacaaaagatacactatcttgattgacatatacttttgtaaatttaccatcttttaacaaataagctacttcattgctatcattgttttccatgagatatacctccgtttatagtctgtcgaccgatattccatacttgcttttaaaatgtcatcagcacgttttggacaataaaaaataaccttcacatttgaaggttaaaatttttaaagtaaactttctttatccccatgctacgagttcagattcaggaaatagccctttactagtatttatgtatattctgtctatggcatgaataaaataattatctcttgtatttttttctaaactagatttttcagcattgataacttcaagactatctatatccatttgaataataccaggcttaatattttcatcattattaggaaaatatttatatgtaacacttttatcattaatttcttttatttttaatattagcaatcatttccacctctaattaattaaaatactataattatattttatttctgtaagtttatgtgcctctatatagtgtaaattatacttattcattagatagtgttcaagagcttcatgtttctacattattatatccatttttttaatatttttcccttctcttaaacgttgccaactttgagccatataaaagtcaggatcaaattgtttaaatccactttctaataaatacttattttcaaatatatgttcataaactctttgaattaaatctttatttatattagtatttttagcaattttagaaatctctatctgtttatctcgatttctaactgaattataataaatttgagcatgtctgttccttttgataccgtattcatcacttttattattaagtgcacctgattcaataaaacaaccttctacttgatatttaccttcacgctctttaaagaacttgtctcgccaattgccgacatgtggcactgtggtacttctacaccaaggatgcataggtggcgcattcacacctggtatcatatctttaactttaaatatttttccgttgagtgaatgacataatttagatgttttactatctattttggcaacatatttatattcgccatcttcaccaagttcttttaaatatgttaacttttgtgactcttctttttcaacgaataatgaaaaaagcatataaaaatagcatcgctttctctttatctgtgtagaaaggatgctttaataccatgctattttataattttcgggaaattcttgcttctcgataaagtctcttactacagaaaaagacttattacgatataacataaaatattcttcattttctatttcagataatgagaaatctataacctctgcatcttttttattaaaagttactgaacctttaccgttacttatatcatcttcaggtatatattcatatattataacctgttcatcttctttcaattttattaatgtaagcatttaatccaccttcttttttataaaaattgaataatcgtatttttttgatacaattttatgtgcataatcatagttgaaattatacttattcatcaaataatgttcaagcgcctcatgacgcagcagtattaaatcttgttttttattgtttttccttctcttaaacgttgccaacttactgcgatattatattctggataataacttaaaatcgaataattcactttgaacataacaactcactccttgtatagtggtgaagcaagtattattattaaattgtaggagggaaagtccctcctgactgattaacgctcgaatgtccattcaatctttataaagtagagatttattaagattaacaatttggtacatttgagcttttttatttccttcactcgcaccttcttaaacttatatgttcattatacaaatataaaaagctataacaatttaatgaaaatgcccccttcgaagtcgacattgaaaaaatgaaaactttgaagggagcatttcaagacgatccattccaatcttttttatcatttaaaacttaacacttattttcccttattcgatgctaatttcgtgcaataaattctaaatgaaacgacatactcctttttcacaaattggaatctactatttttgtattttaattattataatatccattcaccatatgatttttattaatagttaaatcaaataaacatagcttgattaatttatacattagttaaattacaaaactttattggcatattcatataatttttctgttgtattcagggttagattatctacttcgcgtttgccctgtcttaattgtgaaagtacgtattgagaaactccagtttttttagaaatttcatatcctgttaaattactttcaattaattcaattatttttttcttgtattctgacattttttcatctccatatctgtacaatgttttctgctttttttcgaaattctgtgaacttaacgtattttttatctataaatgattttattatttttctattcattaatggctatcatcacttcataatagttaaattttatattttcaatttttgtttctacatattaacgacttttcatcatcaattactttgtcaaagataaacgatttgtcttgtataccttacgccttttacaaaacttcaatgtttagtattcattgaagtttacagccacttctaaagtttaaccttttatgtatttttattagattagtgtctttcaatattcaaactactaactccagtagtctattaaatttgagatattgagatatctttagaatttaatttttccggagtcatatagacttctcaaatactatacatttatttcataattttgaaccctaatattactaaaataattataaacgtccctattaaaaattctattttctcttttttatttgtttttcgcactttaatagtcatcttcattttactaatggtgagaaagtaatattttattcaaagaatatgacttcatattaaatcaaacctcacattcttattagattgcaaattcaatagtcctaccagaattgaaatcaaaacattcaaactattttatcgttttaacttcctcgaccattttcacctccttataatctatataaattatgtttaccacacgattctttacactcgaaaaattaattttgttaagaaacatttagccatgtaactttgtaataaaaacattttcaaataaatgtaccaaaaactttcatgaaataaagtatacttttcaaatctattaattttagaatcataaaaccaaatgctatattacaatataattatcacaaatcatcatatatgccaattacacaatttaatataaaaaattgtcaatgaaaaattatgtgcataaacattattacaaaatatgtatagtatagaatactgcattaaagttaacttatttactgtgttcagccttttatatcatcgcttaaagatcattcaagatttaatggcaatgataatttcataatatgcatttttgattatttaaccatgtacaatttctaaaactaagagattatcttattgaggtggacaaaacgtggacagacaaccatgaaatcattagaaatttaatttcttgtccacctaacctaacaaaatatttttgttaacattctgttttattttctaatgttctttgatattcatataacttgattatcgttttaaatttagcttcttttattttagttttacctacctttaaatcagtaactgtttgacgtggtacacctgagttttttgaaatactatatggtgtattgttagttaataacttttctatttcacttataatagtttcaatctcattcattattaatcacactctctttctatttataattataataatcctaatgcagtaactacgtttagcaatacattgtttttttctagttgccaaactagttaattcataaactaatacctaatagtattggcgttttttttatatattgataaaatttcttgtctccatctattctatattatattatttgataattttttatttatattcacattaagttatccatatttaatatactttaaaattagatgacttaaaaggctcactccatgatatttcaaaaatatggccttattttaatcttcaatcattatttctaattgtttttggtaattatagagtttttccgctgtttctaaagttaaattattcacttttcttttcccgcttcttaattcacttataccaccataagaaacatcagtgtcttgattaattctataattagatattgatttatcatttagtaatttttctattgtattataaatttctttaaactggttcataatttttgtcaaaatgaaagaataatttatttttttctagttaaattaataataaataatattaaagttgcaatgttaagatagagagttaattttttccttaattctcttgtcataaataccacctccctatttaatgtggtaaaggtcttttgccctttacctttttaaaagaacgatttgataaaattaagtacttgaattattaagctcgtcacagctattcgaaatttaattttgctattcgttctttttctttaaccattcttatcattttttctcctttcctctttatagttatttaacattccacaaattggggtaagtgacatgttgaactcccatatccactggcaagatttataatttgtaattctaaagtataatagcctatatttttcaaaatctctttttttatgattaacatccctctaagtgcacctaaaggtttttatgtaatgtattaaatatttccatttatacatatacatcttgtataaaaagaaagaactccatatatactcaaaaggtatactgaagctctatatattatataaaattattatactattttgaaaaacataagtaaatcactaaacatgatttctttcacttttagaaaacttttaatactataaaagcacccactcagtcactagtttgggcagttattgtatgcctattgaactcaatgcttatattacaatacctttttcgcatattcatataagatctttgcattctttaagcttaaattttctattcttctttctctacggcgcatagcattaatattaccgtaacttatcccagtatctttattaatttgataactcgatatctctttgttttctatcaattctttgattgtattgaatatttcatcatagcaattcataaattagatgaggcgaaatttttaattttttagaatatcaatagtagtataactaaaatgaaaataccgatcgataaacaaaaagatattttttgttttgtttctcttttcatatagtattacccccttaataatgcgtagtaaggtccctcttttcggggtcttaccttagaacgttctgcaaatgaattcgatgagaagtaatatgaatatggctattttcaagtaatactcaacgttttcgcgacgttcttttatcgcctcatctcatcacctccaaatatattaaaattcatgtgaactaaaatataaaatggtcttccccagctttaaaaaaataaatacataaaacatttacttgaccaaaacttgaccaaatccattttttaacaaaagtggtcaagtgaaatcccatctttccaaatcaaaaaagagctaaagcaaaatgctctagcccttgatattactgatttcccatcattgtttagcgtattaatattgcttcatgtactgatctctttcccattcagagacttgagttctgtagtaatcccattcaattgattttgaattaataaattgattatagatatgatttcctaaagcttttttaataacttcattttcacgcattgcttttaatgcagtataaagtgttgaaggtaagtcttgaatgcctactgcttcacgttcttcacggttcatttcgtaaatattttggttaactggttctggaacttttaatttatttttaataccatctagtccagcttctaagattgcagctaacgccatgtatgggtttgcagctggatctactgaacgtacttcgatacgagtagataatcctcttgaagatggtacacggattaatggtgaacggtttttaccactccatgcaatataacatggtgcttcataaccaggtactaaacgtttatatgagtttactaacgggttacatacagcagtaaatccgcgtgcatttttaagcacacctgctgtaaattgatatgcagtttccgttaagcccatttcagtatttggatcaaagaatgcattttctttacctttgaataatgaaacgttaaagtgcataccgctaccattcacaccgaataatggtttaggcataaatgttgcgtgtaaattatgtttacgtgcgattgttttaacaaccaatttaaatgtttggatattatcacatgctgtaacagcatctgcatatttaaagtcaatttcatgttgaccaggggcaacttcatggtgactagcttcaatatcgaagcccatatcctctaattctaaaacaatatcacgacgacagttttcacctaaatctgtaggtgctaaatcgaaatatccaccatcatcattaagttctaaagttggttcccctttttcatccaacttaaacaagaagaattctggttcaggccctaggttaaagtctgtgaagcctaaatcttccatttcttttaatacacgttttaagtttgcacgaggatccccttcaaatggtgttccatctgttttatatacatcacaaattaaacgtgcaactttaccttgtccagcagtccatgggaagattacccaagtatctaaatctggatgtaagtacatatctgattcttcgatacgtacgaaaccttcgatagaagaaccgtcaaacatcatttcgttatcaagtactttttctaattggcttacaggcacttcaacatttttaattgttcctaaaatatcagtgaattgtaatcttaaatatcttacattttcctcttctgcaaatttacgaatgtcgtctttagtgaaagtacgttttggcattttaaaatcctccaaattttatttaataaatcgggataaatcaccacgatttattggcaaagtttctccaataggcttttgcgtggcatctacaatcatcttttttcttatctcttgttcatctgttgttaaatgctcttgtgagtcataaatgatttgtttaatccctttgatattaaatcctttttctaataatgatttaatttctagtaatctttccaaatcattgagtgagaacagacgtttttgaccttctgttctttcaggtttgatgagttcatgtgtttcatagtaacgtatttgccttggcgttaaatccgttaacttacttactacactcatagagaagacagccatatttcgtctgattgcatcattcgatatcattgttcctctcctctacttttgaacttgttaataacttatcataatttttttaggatttcaaaaatatgtcaggttttctaacataaagcttaaaacattgatataactacgatttcgacttctaaaacgacataaaacaatctacagctaaaatattttttcaatttttaaaaataatctgataaatctccgcaaaaaatttcacccaaaacacattatcatttagggtgaaatttaatctattatataagtccttgttctttcaactgattaacagctcttgtcacagcaattttaacgtgttcatatgttaatcctccttgaacatatgcttcataaggaggacgaataggtccatctgcagataattcaatcgatgaaccttgaataaacgtaccagctgccataataacatcatcttcgtaaccaggcatataactaggttctggactaaaatgtgcattaattggggatgcgtgttgaatactttgacaaaatgaaatcatttgttctttcgtttcaaatttaactgtttgaattaaatcagttcgtttttcgtagtacttcggcgttgtgttcatattcattttttctaaaaataaactagtaaacaatgcacctttaagactctgactgacaacgtgtggtgctaaaaagaaaccttgatacatttcaagcaatgcatttaatgatgcacccgcttctttaccaataccaggtgctgtcaatctataaccacatcgttcaattaaatcttttctaccagcaatgtatccaccaatcttagctaaaccaccgccagggtttttaattaatgatcctgctattaaatcggcaccacattctataggttcacgtctttcaacaaattccccataacagttatccacaaatattaaaatattaggatgcacgtttttcaacctagtaattaccttttcaatttcatctagcggaattgaaggtctttgatcatagcctttcgaacgttgaatcgctattactttggtgcgctcagaaaccccatctaacacactttcaatatcgatcttaccttctttaagtgcaatatctttatacgatacgccatgctccattaaactttcaataccatttccgtttacgccaatgacttcaagtaaagtgtcatatggactacccgttatataaattaattcatcaccatgttttaataaactttgtaatgcaatagtaatcgcatgcgtacctgaaataatttgcggacgaacaattgcatcttctgctttaaatgcctgcgcatatatttcttctaaatgatcacgtccaaagtcatcatacccgtatcctgttgatccttgtagatcactttcggttgctttgacatgatgaaatgcatttaatactttttcttgattaatatatgctgtttcttcaatttctttaaaatatggtgctaacgttgattcgacgtcagctactatcttacttatatctttcatttgaatttcgtccttttattattttttaaatccttttatacgataaacattttcaatttcatcatatttaagttcagtcactaatgtatgttgttttagaaaatataatcgatctgcattattcgtcgcaattgtctcatcataataagttaattgccttttgatttcatcaataaataacgtcttaacaagtaatttatcaccatcatttttagaagaaacaaaaacattaggcaaatcacttgctggacgatttgatgcatgatcacataagtcctttttattaaaaataactatttgagaaatatgactcatatctaattgtttgattaaatcattaactgtgtcatactgcgtacggtattcaggatggctactatctacgacatgtactaataaatctgcacctttagcctcttctaaagttgatttaaaagctgcaattaacgtcgtaggtagtttctgtataaaaccaacagtatctgaaataattaaattaaatccatcatttatttgaatttgtcgtgttttaggatctaacgttgcaaataattgatctttttcatacgtctcttcatttgctaaaacattaaaccatgatgatttaccagcatttgtataaccaactaaagctacttgaaacacctgattttgatttcttttatttcgatatctttcgcgatgttcttctaccgtccgcaattgatgtttaatttcattcatacgagttcgaatatgtctgcgatccatctctaacttcgtttcaccagggcctctagttccaataccgccacctaaacgagaaaggcttttaccatggccttgcaatctaggtaataaataatcaagttgtgctagctctacttgcaatttaccttctttacttcttgctcttaatgcaaatatttcaagaatcaactgagttctatcaataatttttacacctaaagcttcatttagtgatttggattgtgcagtcgttaattcatcatttgtgatgactacatcaatatctttgaactcaataaatgcttgaatttcttcaattttacctttaccaacataatatttgcgatctacatgatctctgttttgagtaatttgacccaacacttcaagttggcaagtctctgataaagatgataattcctccattgtagactcaaaattaaattgcttatcatcttgagcatgtacaccgactaagacagctttttctagtttatttttagtatcatgaatttgttgctgagccatgttatacatctccttaataaaatcctactcaaagtattctatcatagagttttagtaaagactattacacgattttgtggtacattttaagtaaatcgaaaggatgatacaatggagacaatttatgattttgtagtagaaacaaataaaggtgttacttacaaattagatgcatataagggtgacgttatgctaattgttaatacagctagcgaatgtggctttacttcacaatttgaaggtttgcaatcattatacgagaaatacaaagatcaagggtttgtaattctaggtttcccttgtaatcaatttggtggccaagaacctggttcaggcgaagaagcagctcaaaactgtaaattaaactatggtgttaccttccctatgcatcaaaaaatagacgtaaaaggggaacatcaattacctttatttagatatttgactgcggcacaacacggattctttaatgagaaaatcaaatggaatttcactaagtttttagtggatcgcgaaggtaacgttgttaaacgatttgcacctcaaaaaaaacctgttcaaatcgaaagagaaatagaaaaattattataaaatatactagctcatagcaaataaaacgcttcatataaagtcgtatcatatattgactcgacctttatatgaagcgtttttattacaaacattcctctattgtatcttgtcatttgaacatcatttaattgatgtcacatatgactttatttctatatctatttatcatacttcaaacgttatgtacacgagtcattaaatcgtgcccatatgattacaacttattcttcactttcagtagatgcttgaccttcagtttctactgtataagtgctgatcgcatgtttgtaaatcaagtgttgtttgccttgagaatttaagcttacgacatacttgtcgtattcttcaataacacctttcatttggaaaccgtttagaaagaatacagttacttcagtttggtttgctttaaaattctctagtgctttgtcttggatgttttcgtttgcaatcatctgtcggactccttttacttaatctgggttgtaatctcatctaacatcatttgaagtgacatattttctttatctaaccaatgaacactcattttattcttgaaccatgtcatttgtcgttttgcatattggcgtgaatgttgctttaaatcattgacagcatcttcataaatcatttgtccgttaatcacaggtattaattctttatatccaatagcttgcatactttggcaagattcatagccttgttcaacaagttgttgcacttctctaaataatccgtgatccaacataatatcaacacgtttatttattcttgaatataatgttttacgcgacatttcaatccctaataataatgtatcataattttcagtaaattgttgcactttcttgcgattactcaaaagtttttttgtttttaaataatattcaatagcgcgcaacactctttggcggttgttagggtgaatattttctgcagaaaccgcatcaaattgagctaaataatcgtgtagttgctgattatctaaatgttctaatgcagataacttttgtttaactatggataattgtgcaggtgtaactgtttcatcttctaattcataattatatattaatgattgaatatataagcctgttccacctgctatgattggaactttacctctattcgttatatcagtaattaaatcttctgctaatcgcttgaattcatatgctgaaaatgtatcatcaggattcaagatatcaattaaatgatgtggaataccatccatttcttcaggtgttacttttgcagttccaatattcatatgtttgtagacttgcatagagtcaccgcttatgatttcaccattgatacgcttcgcgagttcgatgctaagctctgttttacctgaagcagttggccccacaattactacaataaaaggcttatttttattcatatttaattccactttctttattttttataaaattgattcaaccatttaaacaagtcttcccaaattttgtcatgatctttttcaaataacacttcatgacgtttatgatgataaagattcactttaacatttttaatgccagcttttctatatatattcgccaattttaaaatccctttaccataatcacctaaaggatcgtcatatcctgaaactaataatataggcatggcatgatttaacattttcatattttttaattgtgatgtatgtagcatataataggctgtttgatataataattgatttgacacattaaatccactatatggatctttaataaagttatctacttcaattggattactagaaatccaatcactttgtgtacgtaatggacgtatttttttattaaaactatttgatactaactggttaacccattcaactcgtttctcagcaccataaatttttgtaatcagttgtaacactttaacggttggtaaacctttccataatgaatacataccagtaccacttaaaattagaccatcaacatattgcggatatgtttctacaaacaatctagctataacggatcccattgaatgtccgattataatgtatggtttatcaacattgcctctcactgtttgcgctacttcaaaggcatcaccgataactcgtttcatatcatcgtaatgccctcttgttgattcatcaatattaataccatgtcctcgatgattatgacgtatcacatcgaagccatgctttgaaagtgcatgtgctaatttatcgtaacgttccatatgttcagccataccatgaaatatatgaataattccttttgaatctacatctgtaaaattcactttaacttcaatattcgtattatcttgtacagttaatttaaattgtttttcagtcatcatctcacacctttaataacaacgcttttatattcgcttttattattatcatacatttagtgatgcatagtttcaattgactaatgtatctcgtataaaaaaactgatgcccttaaaacaggacaccagtttatgattgtacaaattaattattctttaactgctggttgattatttccatgttgcgcttctttaattgcttgctcaacttcttcagtatatgcttcaatttgagctggagagtaatcaagcatatctgccataatatcgatgacagcatctttataatctaatacatctttaatattgaaatacattttaccagaacgacgaactaagaaatcgttaggtttgtataccatttcttgttgaatactataaacaagttctacataaatttctaatggtaacttgctatcatggtattgagatgtttgcgcaatgttgaacaattcatcaacatttgaaccatatttagatgctaaacgtcttgcaacatcttcatcaatgccgaatcctttagctacatctactttttgctctacaaacgcatcaaagttcttgctaccacctacatcgccacctgaaattgccagaccttttgtattacatggactaaatgttaaaccgtagtcttttttcaagcgtttagatactaaatcaacaatgtcttgagccatgtgacgatagcctgttaatttaccacctgcaatagttaataaacctgatttaccttcccaaatttcatccttacgagagatttcagaagggtctttgccttcttcgtaaattaatggtctaattcctgcccatgttgattcaatatcttcatctgtaacattaacactagggaacatgtaattaatcgcatcgattaaatagtctctgtcttcttgtgtagttaatggtgaagatttgatattgtcatagaatgtatctgtagtacctacatacgcttttccttcacgtggaattgcaaaaatcattcttccatctttttcagtatcaaagtatactgcttgacctaatgggaattttgattgatcaataacaacatgtacacctttagttaaacgtaattttttattattgcgtgcataatcaccacttctaacatcatcaacccatggacctgctgcattaaccacttttttagccttaattgtataattttcattagttaatttatctataactttaacaccatttacttgttgatttttatcataagtgaagtgttcagatttagtatagttgataatttctgcgcctttttcagcagcacgcttcataacttcaatagttaaacgcgcatcgtcagtacgatattcaacatagtaaccgccgccttttagaccttcttttttaactaatggttctttagctaaagtttcttttttagataacatttttttacgttcagacttcttaacacctgctaaacgatcatacattcctaaaccaattgatgttgagaatttaccaaatgttccacctttatgcattggtaaaagcatccactctggagtcgtaacatgaggcccattttcataaacaatcgcacgttctttaccagtttcggcaactactccaatttggaattgttttaagtaacgcaaaccaccatggactaattttgtagatcttgagcttgttccttgtgcaaagtcttgcatttcaactaatgcaactttcattcctctttcactcgcgtctagtgcaatacctgcacctgtaataccgccaccaataattactaaatcatattcatcatttcttaaattctttttaatatgttctctcttaaaagtagacaatgccattccaaaacgcctcctaaaaaatgtaaaaacgagagacttgtcccacataaacaatccttcaattgtacatgttcgaacaaatctctcgcttctcgattcaaatattaacttaaattgattgtatcacaatgtttatacaaaagtctaatctacaagtttattctgttttaaaaacttgtgttgcttcaacagcttttttccaacctctatataatttttctctttcgccttcatccattttcggatcgaatttttcttctaatttccagtttttagcgatatcatctttactctcccagaatccaactgctaaacctgctaaaaatgcagcacctaaagctgtagtttcttgaatttcaggtctttcaacagaagtattaacaatgtctgcttggaactgcataataaagttatttttaactgcaccaccatcgacacgtaaactttggacatcaataccagagtcttttgacattgcttccataacgtcacgagtttggtaacatagtgattctaaagttgcacggataaagtgctctttttcagttccacgtgttaaaccgaaaatcgcaccacgtgcttcagaatcccaatatggtgttcctaaacctacaaaagctggaacaacataaacaccctcagtagagtcaactcgtgtcgcataactttctgattgtggtgctgaattaatcattcttaatccatcacgtaaccattggattgctgaacccgaaacaaagatggaaccttcaagcgcataatttacttttccatcaataccataagcaattgttgttaataaaccactttcagatttaaccgctttgtcacctgtattcattaacatgaagccaccagttccatatgtgtttttcacgtcaccacgttcgaagcaagcttgtccaaataatgctgcttgttgatcaccagctactccagcgattggtacttcttgaccatagaagtggtaatcaattgtcttaccatatacttcactcgaagctttaacttctggcaacatatttttaggtactgtaagtagttctaataactcatcgtcccattctaaatcatggatattaaacattaatgtacgactcgcatttgaataatcagtaatatgcgcagcttttcctgataatttccatactaaccaagtatcaatcgttccaaataatagatcgccattttctgctttttctcgtgcaccttcaacattgtctagaatccatttaacttttgtacctgcaaaatacggatctaaaagtaatcctgtcttatctctaaatgtttgttcatatccttgttgttttaattctgaacaaattgattgtgtttgacgtgattgccaaacaattgcgtgataaattgggcggccagtatgtttgtcccaaacaaccgttgtttcacgttggtttgtaataccgatacctgcaatttgatcagctctaacatcattttcattaattacttccgtcattacagctaacacagatgtccaaatttcatttgcatcatgttcaacccaacctgattgtggaaaatattgcttaaactcacgttgtgctacccctgcaatttcccctttttgattgaataaaatcgctcttgagcttgttgttccttggtctatagataaaatatatttttccattagtagtatctcctttattaaaaaataatcgctaacccattgtacaaaatctgttaaattttggcgaaaaaatagcataatccatgaatcaaacatgttaaattatgctatttacgtttctttttattttagtaaattgattcgatatcacctttttttgatgatttatttaaaatgtaacctaaaatcaaagtaataataactacaacaattgcaattgcacaaccaatattaaatgtatgtttataaaatacagcgtataccactgcacctaataaaccaccggcaattggtcctaagataggaacgattgcatatgaccaatttgaaccacctttaccagctattggtaaaatcgcatgtgcaattctcggacctaaatcacgtgctgggttgattgcataaccagtagcaccgcctaaacttaatccgattgcaacaattaatgctccgacaattaaaggatttaaaccatcggcaattttgtttacaccgataaataaaatacctaaagttaatgccattgttccgataatctcacttaaaaagttggcaaagtaattcttaatagccggtgctgtagagaaaacacctaatttcgcgccagcttcttctgtcgctttccaatgtggcaagtacattaaccatacaattgttgctccgacaattgcacctaacatttgagcaacaatataaccaggaactaatgaccaatcaaaacttccgtctaatgcaagagctaaagacaccgctgggtttaaatgtgcacctgagaattgaccgacagcaaacacacccattgtaaccgctaatccccatccagctgtgatgacaatccaatcagcaccattcgcagcacttctctttaaattgacattggcacaaacgccaccaccaaaaaggattaagattgcagttcctaggaattctgctaaatatacattcatattaaatgtcctcccaaaaagacaaagagattcctacactagcagtttggctcgtagaaatctcccgtctctattctatgtattaacttttattatatttgttatgatactatcgatatgaaagcgttgtcaatggtttttgtaaaaattttgtcaaatttaatttttcaagtctttataaaagtagtttaatttgaaaactagaaataccaatcctaactaatttatttatgacgctcttttgtttaattgacattcttcagccatattttttatgactagttgcattttttactaataaacacctctaaaactttaatgattttaatcgttttagaggtgctaattattttatttgattattttttgtttgatacctactgcatatcccatatgaaaacggcttttttattatgttatatgactaaatctcgtgaaaaatgaaatttttgcagacttatgatttaccaaagtttatcataactagtagttacatatttcgctccatttttaacagcttcattgacttcatctattgtattaattaggccacctgcaatgacttgtgtgtttgtttctttctgaatatgatgaatcgctttactcgcaacacctggaagtacttcaacaaaatcaggttcaactttttttatcaaatctatactgcgtttcaatgcttgactatcaataataaatactctaaaaatcgttaaagtatttaatgatttagctttttttattactttagatttagtcgatacgataccttttggcttgtattgctgaataataaattcacttgcaaattcatcgtggcttaaaccttttatcaaatctatatgaataaaacactctatatgattttgcttcagcaattccataatactttttatatgtcctatatgcatatctagaagcacacacattttatagtctgttttaatcagtttctctaaatctttaatgtttcttatagcaggcaatatgttgttattcacttgattcatcctctctacatcacacgcttaaataatttttctaattcgtattttgaaaaattaatgattattggacgaccatgtggacatgtaaatggatcttccgcttctcttaattgatcaattaaatcagacatttcatgtttttgtaaataatgattcgctttaatggattttttacatgacatcatgattgctacatcttcacgtaattttttgatatctacttttttctcttccaaaattagctcaatcatatctttaataatttcttctacttcatctttagggaaccaaactggatagctacttacaatataatcatgaccaccaaaatgttctaacatgatacctacttgttgaagctcatttttatattgatcaatgactaattgttcatcttttgaaaaatgaaatgttaacgggattaataaatcttgtacttcattggtaacctcacctattttatctcgaaaatattcatattttattctttcttgagctgcatgctggtcaatcatgtacatgccaaattcattttgagcaataatatacgttccatgtacttgtccaacaatttccatatatggaattcttcgtttagggtctttactttttgttcctttaatatcgtttacatcataataatcatcagacgctttattctcataattttgcacagttgtaccatcatttgaatcaaatgtttgatccatttcttgtaaaatttcttgttgttttttgaagtagtcttcatctttttcacgtgtattattataaccagaagattcatcatcagctattaaactttcagatgttttcgttacgaatggattatatgaatcttcttttataactatctcatcgttttgattttcttccataaatggcttactgttactttcttcagatgaaaacgtcttctcttggttattctctgtgttttgtctttgttcaaattcgattttttgttgttcgaatgaatgtaatactttatttttttttggcacataatccaagttatttttaggaattaatatacggtctttaaatgcttcttgtattttgctcacaatcaattggtatagttgctcttcttttgataaacgcacttctagttttgttggatgaacatttacgtctactaagattggatccatttcaatattaatataacaaatcgggaacctacctattgttaagagtgtatgatagccttctaaaatcgctttatttagcataaagtttttaatgtatcgtccattaataaaaatagaaatatagtgcttattacttctagaatgttcaggctttgcaacaaaaccttcaatgtgataatcacttgtatctccagatatatgtactaaatctcgtgcaactttcatcccataaatctctgccatcacttcattagttcgtcctgaaccatttgtacttaacattgttttgccatctgaaatgagtgctattcgaatgtccggatggctcattgccattctgttgacaatatctgttattttacctagttcagtgtataaacttttaatatattttaaacgtgctggtgtattataaaataatgattctacaagtatatctgttccttttttcgcttttgcaggcttatgatttaatatttcaccattttctacatatatttcatttccattagcattatccgtgcaagtcttcaatgttactttagcaactgatgaaatactggctagtgcttcaccacggaatcctaatgtcctaatatgaaataaatcttcatcttgatctaatttactagtcgcatgtctatgaaatactaatcctaagtcttccgcttcaattccgcttccattatcgactacgcgaatagattggacgccagattcctctacttcaatgcttatttctgtagcgcctgcatctatagcattttccaacagttctttcacaacagaactcggtctttcaactacttcacctgctgcgattttatttgctaatgaggtttggagttctttaattttccccattttgcaacacctctattttaattgattttgtaattcacttaacttcaccaatgcctcaattggtgtcatattagataaattcaaatttttaatttgtagttcaatctcgctttcttgatcattttcaaacaaatcaaatgatgcttgttcaaagtctttttgagataaagtatcagttgtttcttcaacacttaagtttaaattttcttgattaatttcaggttcattttcgaccatttttaaatttgatatcgatgattttttaccagcagacgcttcaaactcgcttagaatcacttgtgctctgctaataactttttcaggtaaatcagctaatttcgcaacttgaataccataactatcgtcaactgcaccatctttgactttatgcaagaatataagttcacctttatattcattagcagcgacgtgaacattttttagacttggtaatgcttgatctaatgttgtcaattcatgataatgtgttgaaaataacgttttagcatgtgatgtttcagctacatactctatcattgcctgcgctaaagctaaaccgtcatacgttgaagtaccacgtccaatttcatcgaaaataatcaaactatcctctgttgcataagttaatgccttttgtgcttctagcatttctaccataaacgtactcttacctgaaaccaaatcatctgccgcacctattctagtgaatatttgatcaaatataggtaacactgcctctttacaagggacataagctcccatttgggccattatactaattatggcaacttgtctcatatatgtcgatttaccagacatattcggacctgtaattaaatatataaatgtttcattatctaatcgacaattattaggcacatagtcattataatccattactctttccactactgggtgcctagattccactaattctaatgttttattttcactaaatgaaggcctagtgtaattatatttttgagcaatttctgcaaagctctgtaaacaatctagctctgaaataattttagcttgttgttgtaaacgttcagtatattttttaacttcttcacgtagctgaacaaataattgatattctaattcgatggctttgtcttccgcacctaaaatgatatcttctttttctttaagttcatcagttataaaacgttcagcattcgataacgtttgcttcctcatataaccaaattcacttggttcaaaattttgcaagttggcacgtgttatttctataaaataaccaaacactttattaaagcttattttcaatgattttattcctgtacgttgtctttctttggcttgtaattctgctaaccatgtttttccgttttttgaagcttcaagatattcatctaattgcgtattaaaaccaactttgaatagtccgccatctttaactgaaattggtggttcttctactaaactctgttctaatatatcaagtaaatcatcaaggggttctagttgattaacttgtacaagagtattctgattcatagaatttagtaatgctttaatattcggtatttcagaaatggaatgtttaagttgaattaaatctctcgcattaacatttccgtaactaacacgcccaacaagacgttcaatatcatacacttgattaagatatgttcttaaggtgtctctttctatgaaatgagcactaaattcatcaacgatatctaatcgtgcttcaatttgttctttacttattagtggtctatctatccattgttttaagcggcgtgctcccattggtgttttcgtttcgtccattagccaaagtagcgttcctttttttgattttaatcgaatgctttccgttaactcaaggtttctcttagcataaaaatccattttcatataatctatagctgcatattgaacaacatcctcgatatgcgataaatcacgtttttgtgtatgatgaatataatctagcaataattgtgtcgcttgatacattaatttatgttcagtttgattcacactatagatttctgatgataacgtttccctgactgttattgtttctgtcaccatattaatttgtctttttaaattatcggaaatattgtcattgataacaacttcgttagggtttatcgtcgtaatttcatttaataaagtcgcttcatcattaaaatgtgtaacctttaattcgccagtagaaacatcacagtaactaagcgcaatttcaggttgattcataacaaaacttaaaatatagttattttgtttatcatctacaccaccttgctccatcacagttcctggagtcacaattcttactacctcacgtctaaccatacctttcgtttgtttcggatcttccatctgttcacaaatagctactttatatccattattaacaagtgtatctatataactatctgcagaatgatacggaacaccacacatcggaattggattttcttttttagcatctcttttagttaaagtaatttcaagtacacgtgatgcctccttggcatcttcataaaacatttcatagaaatcacctagtctaaaaaataataagcaatcttggtattctgattttatttttaaatattgctgcatcattggtgtaacattagacatattatttcttcacaacccttgtctctttttaaaatttgtctttacaatatattcgtttgtaagctttttaattattaattatttaacttatacattttaacatacttacttttacaaacctattcataccatataatcacgaagcatcttaaatgtataagaaaacgcctcaaacctaataaaatgtgtcaatagcatgtttagaattaaattaaaattctaacattcaagacatttaattaagtaagggcgttcaatattaaaatgaacaatgactctgtttgaaatcatatatcataaaattattttataaacctttgaagaataccacgtttttttagagtaattaataagaaataacttataatagatccgatagcacttgagactatgaacgtaatcattaacggtttaatgaagaagtcttgaagcccaaggaaatatgctaatggtatacaaattaaacttccgatgacaccagttccaagtacttcaccgaccgcggccataaatatatgtttacgatatatgtaaaacatactagccaataaaactccaatcatactacccggaaatgcaaaagctgtaccagtaccaaaaagaactcttaaaattgatgatataagcgcttgagctaatccataccaaggacctactatgaccgcacttaatacatttacaaaatgctgtactggtgctgccttaactggtcctagaggaatgatgataatactgcttaatacaacatttattgcaattaaaagtgcagttatagccagttttcttgatttcatatgattgttctcctttttgtttgtaattaatcactatgcttggctttattatggtcatttaaacgtgtttccattgttgatacaaacattttcaataattgattcgcttcatattgtgaagtttgaaactgttcaactatgggcaatgtatttatttctgcttctatactctgaatggtatgttccgactgttctagcgcattttgtttcccgtaattttgaaagtttactgcttgtttttgatgcttttttaacatatccattttagtctttatcgtttggttctgatgaatctgtgcttcaatttgttgatatgttttgatagtatccaaatttttaattttatttgcaatattatccgcttggttcaacacgtcatctttattatacatttattgaatcaccatttccggctctacttcctttataaaactgccatttaatgaatactgtttagcttcatctattcgtacttccactagtttaccaatcatttctttaggcgctttgaaattaactagcttatttttatcagtgtagccagcaagaacctgatcatcttttttactacttccttcacaaagtactgttacagtttgtccttcgtacttactcatagctatttgtgaataatgaccaacttttttattcaaacgttgcaatcgttcctttttgacatttaaaggtacattatctttcattttagcagcaggcgtaccatcacgttgtgaatacaagtacgtatatgcatgttcaaaaccaacttcatcatacagagttaaagtttcttcaaattgttcctctgattcatttggataccctacaataatatctgtagttaatgctacattaggaattctatctttgattcgttttactaaatccaaataactttctcgtgtatattttctacccattatttttaatactgcattatttccagattgaactggcaagtggatatgcggaacgatattaccaccctctgaaataacatcaatcatgtgatctgtaaagtcccaaggatgacttgttgtgaaacgaactcttggaatcgctattttagaaattgcttgtaaaagatctcctaagtcatattctatatcctgtaaatctttaccataagaatttacattttgacctaaaagcgttatttctttgtaaccttcacgagcaagttcacgtacttcatctataatgtcttcaggtctacggcttcgttctttacctcttgtaaatggaacaatacaatatgtacaaaacttatcacaaccatacataatattgacccatgctttaatgttgccttcacggacttttggaagattttcaataacgtctccttctttagaccatacttcaacaaccattgctttagataagtatgcttcttctaaaatttctggtaaatgatgaatattatgtgtaccaaatatcatatctacattttgatacgattttaaaattttattcactactgactcttcttgtgacatacaaccacaaacaccgattaaaatatcaggtcgttcttttttcaaatgcttcaaattacctatttcactaaacactttgttctcggcattttctctaatcgcacatgtattaattaaaataacatctgcagtgttaatatcagtcgttgcttgatagcctaatgcttcaagtataccagcaatgacctcagtgtcatgtgcattcatttgacatccatatgttttaattaaaaatgtacgctcgttccccataccgcgatatttttcatcaatttggaaatctctattataacgaacttcttgtttacctctttttttcgcttcttttaaattaggcggctgataaacatgttcaaaatatttactataatctttttctgctttcttatctctctcagctaaaacatctacagaacttgcttttctttgttcttcgttcactttacaaaatcctttctatttgcccgtatcatttaataattatattaaatttaactataaagtgcaaaaacagttaaagttatacgtcatctctaacaagccaattcaaatccagtttacttcacttttaatgttattcatcatatttttcagttaaagtttcaatagtgatgccatctggcacatgataaaacttaacttggctaataatacttggacattcaagttccaccattcgttcatttaatgattgtattaaaattaaacattcattcatatttccttgtactgtcgtttctaacggacctactctaaaatgcaaaccagattcgtcaattattttaatcgcctcgtctacgtaaggtataacattgtcattgtttggtgttttaggaattatttgtatactcattaatgtgtctttcatttttaaaaactcctttattttttgtaatagtaaaaaactgagtagcataaatggatctgttataaatacatttatacgactcagttttaattattaaataaattgttcagttaatgcattgaaggtgtcttcagtaattttgatatctcttttagcaagtggtgtatcatctaactctttaatttgagattcatatgatggtgtttctttatcttgataaacaataccagttactaaagattcatgttcaataacagttttagtcgctaattgtttatctgtagaatcataattttcaatgtcatcaacacttgttaaatgttctttaaaccaatcgtatgtgttaattttattataagtcacacatggtgaaaagacattaacgaatgaaaatccatcatgattaattgcatcttcaattagttttgttaatcctttaatatcgcttgaaaaaccttgggctacaaatgtggcaccagatgataatgctaattctaaaggcgcaacatttttttctatattaccttttggcgttgttttagtaacaaatcctactgctgatgacggcgatgtttgtccctttgtcaaaccataaatttgattatccatgactatatacgtcatgttcatatttcttcttaaagcatggattgtatgccccatacctatagcataaccatcaccatctcctcccgatgcaacaacagttaaatctttattcgccatttttacaccttgagctaaaggtaatgcacgtccgtgaatagaatgaacgccataagaattaatatatcctgaaagacggccagaacatcctataccggtgatgatagctacttcttcaggttctaaccctatatttgcggctgctttttgaattgcagcttgtactgagaaatcgccacatccggggcaccagttaggcttaacattatttctaaaatctttaaatgtcgccatctataccatctcctttatttcagtagcaattattttgcctttttcttcgatttcatgtggtaggaaaggtgtcccatcatactttgtataattttcaatcttatcatgaatattgacattcatttttataatactagccaattgtccttgataattgtgctccactacaacgactttcttcgctttattaactgcatcttgaataacgcttgttgggaatggatgcaattgtctaatttgtatagtgttaacttttatgccttgttgattcaaacggttactaccttcttgaattgcaccttttgtagaaataaaaccgatataaagaatatctgcatcctcatgttgtaagttagcttctactggcgattcaattagtaactgctcaattttacgcattcgtttttccatttgttgttgtctatttgacgcagattcactaggtttaccttcttcattgtgttccacaccagttatatgatgaatacctcctttaacaccggggataggtctaggagaaacaccatcggatgttaacgcataacgcttgaaataacctttatcatcttcttcacgttcaatatcagattgaatgatttcaccacgtttaatttcaatacgattataatctaatttttcaacagtttgtttacctaaagataattgcaaatcacttagaactataacagggcattgatattgttctgctaaattaaatgcttccatagttaaataaaatgcatcttctgcatctgttggtgctacaacaatttttggaatatcaccatgtgtaccataaatcatttgcattaaatctgactgttcttgtttcgtaggtaatccagtagaaggtccacctcgttgggtattaataatgactaatggcgtttcagtcataccagataatccaattgcttccatcattaaagataaacctggaccagcactagccgtaaacgctctgactccaccataatttgcaccaatagccatagttacagcagcaatttcatcttctgtttgaataaccgctccgtttactttagatatattggcaatcatatattccataacttcagacgcaggtgtaataggatatgccgccataaattgtgaacctgcagcaattgcacctaatccaatggcatcgttaccaatcatatatagatgtggtagtgcatctgttgactctaattcaaagtccccgtagatttcaggtaagcgagattgcattaattgataaccttcgtttaatgcttggatattgacttcaactaccttgtcaccttttttagaaaacatattagtaataagttcttcaaatgtatttgtattcaaattcatcaatgcgctagtagcacctattgcaaccatgtttttcattaatgctgtacctaattctttagcggttgctgtaaaaggtaattcaataagctgtgcatgacatccttctggtttcacaggtttagccttggcatcagctaaaataatactgtcttctctcatttcatgatggttaacatcaattgtttcttggtcaaatgcaatcaaaatatctaaatcatcactaattgcatgaacaggcgtcgtagaaactctaattttattattcgtatgtccacctttgatacgacttgaaaaatgtctatatccatataaataatatccttttctattcatagccgtagcgaagatttccccagttgattcaataccttcgccttgttgaccgccaactttccacgataattgtggtttcatagttatatgcctcctatggatatatttcatattaaatgataacaaaaagaaccaccgatttactatgtaaacagtggtactatattaaattcatactaatggacgatagggtccaattcgaatgtttacttacgtaattttaaaatgttgaaaatggatggtcatcatttatcaatatacgttcgatgtgctttgttttaccttctttgtctaaatcaataacaacaccagataatacacttctaccttcatttggaacaacatgtctttgtggcaaactagtgataaaacgctcaattacctctgttttatttattcctaaaatgccatcataaaaacctgtcataccaacatccgttatataccctgtcccctttggtaaaatacgttcatctgctgtttgaatgtgtgtatgcgttccaacaacagcgctagctctaccatctaaatgccatcccattgcatacttttcagaagttgtttctgcatgaaaatcaacaaatataaacggagtttgttcttgtgcttccttgactaattgatctgcctttttaaaaggatcatcaatatctggcataaacgctcttccttgcagattaataactgcaagtttaatatcattaatttgtataaatctcataccaattcccggcgcttcatccggaaaattcgctggtcttactagtcgttttgcttcatctataaaatcataaatttcacgttgaccatatgtgtgattacccatagtcatgaaatctacaccatttcttagtaattgtttatatattttttcagtcaaacctttaccatgtgctgcattttcagcatttacaattgtaactgttggtttatacttttgcttcagttgaggtatgtacgtttcaattgcgtctcgtccaattttacctacgatatcccctataaacattattctcatgttttgttcatcctctcataaatactagtttaattcatacgttctaatatttaaagtaaatattaaattctttgaattatttttcttcaattatagagagacattactttgtctgaaaacttcaatatgttagtattaagacatcaaaataaataggagttgtaaataaatacatgtctattaatattgatccagaaaaatttgcagaattagtggttatgtctaacccatcaaaattcgaagatgcagaggatatagctaaagaaagtttaaagctttacattaatgcatatcgtttagcagagagatattcaacaattgcaacaaattgttatgatactgcagaagttataaaagaattaaagaaaacagatttacaattaaaataactcaacttagaaataaatcctaattaatattgcagaagagaagatgtgttacatcttctcttcttttttattggatagaaaagcaatcatctttataggtttacataatataaatatagtaattacgaagcctaaaacatttttattaaaagcaataacttcttatttaatataaggtccgtcttactttcaaataactactgtttaatatagttattaccgataaagtgctgtctaactagattaagactacaacttaaaaaagctccctcactaatttgtgagggagacaaaaattatttcgcatattctactgctctagtctctcgaacaactgtcaccttgatatgaccaggatattgtaattcatcttcaatctgatttttaatatctctagccaatcgataagattttaaatcatcaatttcttcaggagatacaatcactcggatttctctacctgcctgaatcgcaaatgctttttctacaccatcataactttctgataacgtttctaaacgttctaatcgacgaatataattctctaatgtttcttttcttgcaccttgacgagccgcagacaatgcatctgcagcagcaacaaggatagatataatagatgtaggttcaacatcaccatgatgagaatggattgcattaataactgtttcattttcaccatattttttcgctaattctacaccgatttcaacatgactaccttctacttcatgatcaattgctttaccaacatcatgtaaaagtccagctcgtttcgctaatgtctcatcttcgcctagctcagcagctaacatactagcaagatgcgcaacttcaattgaatgtttaagtacattttgaccgtaactcgtacgatagtttaaacgccctacaatttttactaagtcaggatgcatattatgtgcgttcacttcaaatgtagcttgttcacctgcttctctaataatatcgtctacttcttttctagctttttcgaccatatcttcaattctacctggatgaatacgtccatcagatactaagttaacaagtgctgttctagcaatttctcttcttattggatcaaaaccagataatataaccgcttctggtgtgtcatcaataattaaatcaatgccagttaaagtttcaagtgtgcggatgtttcgtccttctcgtccaatgattcgacctttcatctcatcattaggtaagttaactactgataccgttgattcacttgtgtgatctgctgctaatctttgtactgctgtagctaataattcttttgctgttttatcaactttttctttagcttctttttctttttctttaacaagtactgcaatatcttgtgacagttcttcctctactctttgaagttgctcattaatagcttcttcttgagtgagaccggagatgcgttctaattcttgttcatgcttcattattaacgtttgaacactactctcttttgcatctacttgttgttgtttttcttcaatttttgattctttttgctctaaaatctcatcttttttatctaatagatcagatttgcgctctaagttttcttctttttgaagaagtcgggtttcttgtctttgaagttcgctacgtctttctcgtagttctgcttcagtttgttctcttaggatttggttttcttcttttgcctcaagtaatttctcttttttgatattgtcagcttctttatgtgcttgatttacaatatcttcggcagtttgtctagcttgtgattgcttttgaagcaacaaatttcgggcaacaacataccctccaacaactcctagaatgatccccagcaaaatgagtaggaggcttaataaattcacacaaacacctccttttctagggtttgctctttatatgaaattcaatatgactttatgaaattatatataaatcatacaaattaattgtacggtttataggagataagtgtcaagttatcaatttgcacttttgcactatattgaatgctatttctactattttctaaagttttgaagctcgattataaaactattgataatgtaataataaataaaataaaaaaccttatagtctcgatttgtagtgtatcccataaagttagatattattctagctttatgagatgaatatcactttcaatcaatcctataaggatatttgctaagtttaactatagatataaatttgtgtactattcttcgtcaaataatgactttggtgcatcttctgtttcttcaacatcaccatcagatatacctaatttttctctcaatttacgatcaatttcttctttaatttgtggattttctttcaagtacattttaacattttccttaccttgacccattcgttcgccattgtaagaataccatgctcctgatttatcaacgatgtcgttttcaacacctaaatcaataagttcaccctctttagaaataccttgtccatacataatatcaacttcagctactctaaatggtggtgccactttatttttaacgactttaattttagttctattacctacaatttcttgtccttgtttaagctgttctgcacgacgtacttctagtcttactgaactatagaattttaatgcacgtccacctggtgtagtctctggattaccgaacataacaccaactttttcacgaatttggttgatgaaaatagcagttgtatttgatttagaaatagcacctgaaagtttacgtaacgcttgtgacattaaacgagcttgtaaaccaacgtgagtgtctcccatttctccttcaatttcagctttaggtgttaaagcagcaactgagtctacaactacaatatcaactgcaccacttctaacaaatgcttcggcgatttcaagaccttgttcaccatgatccggttgcgataaatataaattatcgatatctacgcctaatgcttgagcatattctggatctaaagcatgttcagcatcgataaatgctgccaccccgccattactttgtacttcagcaatagcgtgaagcgctactgttgtcttaccagaactttcaggaccataaatttcaataattcgtcctttaggatagccacctacacctagcgcattatctaatgtaactgaaccagttgatgtagttgaaactcgacgacctatattgtcacccaacttcattacggcacctttaccgaaagatttctccatatttttaattactgtatctaaagctttttgacgatcgttatccaaagcgagacctcctaattgaaattgctatcttttaattatcttaccaatactatacaaggattcaaaataaaatacaagtgttttgcgaatatttgttcgtataaaatcttgaaatcaaaacgcaaaaacgaacaaacgtgcttatatttttatcgataatacaattaatttgttgttctaagccaatttaataatcttatgagcgcataattttgacttctgttctttaataaatttctagatttagacattttaaattgctcagttttaaattcaaagttattatcatagcctatatgaactacaccatcatactctaatagaataattgctgatgacacattaaacaatttattaacaaattgcactgcatcttttaattgctgctcaataggtttattaatatcaacaaagttttcattgtgattaatcataccctttagaacatcgtttaaatccacttctttcaatcgatgatataaagcaccattagtaataccatcatatattacaaaaggttcatgaattttctttattacagcttgctcaattaatgtgtcatctgaaccataataatattctccaatacgatcaagaatttcttgtttaacaggttgaatcaatgattgtgcttgttcttttgagtcggcatttgcagtcaatctaatatatacttcatgacttcccgccaaaggcgcaatcgtaggattagtctgtttatcgataagatctattaatattgtttctactttagattcacctattcccgcaaatcttaatagttcagaatgtataattcgattatggtttataaaatgtgacaacaattcatttttcaccattggttgcatttctttcggtggacctggtaataaaataatttgtttgttttcaaaattcaccatcattcctggagccatgccatgatgatttgttaatacagttgaaccttcaattactaaagcctgttgtttattattaggtgtcatttcttgtccttgttcctcaaaatagctttcaatatattttaaagaaggctcatcaataactaaatctttaccaacaatctgggccactgtatgcttcgttaagtcatctttcgtaggacctaagccacctgttaaaataacagtatcatatttttctagcgcatgacgtacacttgattctaaacgttttttattatctccaataactttatgttctaatacattttgtccaatttcattaaatactttagatagaaattgtccgttggtattagcgatttgacctagcaatagttctgagcctacagcaataatggcaattgacatttatatcccccttgtatcgtttaattcattttttcatgtatttcatttaaaaattcacatcaattttagattcaatgtatcagatgctactacagattttccctaaaaaaatgaacaaatattgttttacaatatatcattataaacaattgcgtggctaatttctaaaattgggattaaaaaaactagattccatatgaaaatgaaatctagtataaacaaatatttatttttgtttaaaaacatctctacctttataaaagtattcaataccagataagatagtaaaaataacgccaatgtataataaaatttgtcctaatgacaaaccaatcaatgttgccaatggatcacctaataacaaccaagtaattgctaccatagtaactgctgttttaattttacctaattgaccagctgcacttacgaatccttgttcaatttgtagtaaacgtaaaccagttacggcaaattctctggcaataataatgattgctactacagaatttgttagtcctagttgcacaagtacaattaaagcacttgcaactaataatttatccgctaatggatccaaaaatttccccatatttgtaactaaattccattttctagctaaataaccatcaacaaaatcgctaagggaagccaatataaaaataaaaccactgattaataactcaattcttatttcatatcctcctagaaatgacacattgccaaatccaaaatcaactaacgcaaacaatataaaaactggtattaacactactctaaaaaccgtaatctggttcggaatattcattatacatcctcatttctcactaatttatttctgttaaaatattaaaactaacatgatccataacaataaagttattaaaactgtaatacccatgattactaataattgtattggctcttttgatttactcttataatctaagtctttattattattgaaaactgtaattacttcgtcccattcggcttggttcgatggaatttcatcttgatgagcttgaattaattggttaggttcaatatttactacgcttgcatattttctaataaatccttcgctgtaatttttattcggtagttgatcgaattcattattttcaatatgcactagcatttcacgtttaattccagtacgttgctctaattctgttaaagtcattcctaacctttcacgtctaccttttagcgcttcaccgaccgttttcaattcatagcctccttacacttactcgaagaaaccaaaaccaccaccaaacggatctccaaaatctaaattattcttactttggactgtctgtttcttcatttcttcgtaatgtatttcttgattttcattttctctcaattcgataatatagtcaaaatcttccattgtacaagtacttgtttcaacaaataaatctggatgttcaacgactttgattgatggtaacgtcataacttcgttaacaagctcttgatgttttggattagattctctggcagtaactgcaccatcaataatgtatacatgattggcatcatattcccctttaattagagagctacgtacagtttgttttattaaagtagaactaataaataaccatctcttatgtgcacaaacacttcccgcaacaattgattcagttttaccaacccgtggcatacctctaatgccaatcaacttatgaccttcttctttgaacaattcagctaaaaagtctactaacaagcctaaatcttcacgctcaaatcgaaaggttttcttatcttttgcatcttgctcaatatatcttccatgtcttactgcaagacggtctcttaattctggttttttaagctttgttatttcaatttcatttataccacgagctatttgctcaaaacgttcaactttttcaagattgtctgttttaattaaaaggcctcgtttaccttgatcaacaccattaattgtaacaatacttatacctaacatacctaataaactagatacatcacctaaaagacccggtctattaatttcaatttcgtattctaggtaccattcttttttctctgcaactgtcatggtgaacctcaccccttgtttaattaacaaattatgattcattgtaatattcatattataacatcaatcataaaaacatttgctcataaaaatagttctatattttaaatataccaagcaccattaactttctgtatagttccagtaacacttctagcatttgggtgatataaataggcgcatgtatgagcaacctcactcggtaaaaccaatcgctgttgtggtaattcagttatcattgcttgaagttcatcttcttgccactcacttgccatattaccggctacaaatccaggtgcgatagcatttactgtcactgatgttagtgcaagctcttgactaagcgccttaacgaaacctaattgtgcacttttcatcgccgaataaatagtttccatactagctcctgtctcaccccaaattgatgaaattacaataattcttccattggcactttgacgtaaaacatcaacgaaatatctacataatcgaattaattgcaagacatttaactgataacatgcatcaatatcatggtctttcatatcttgtaaaacaccatataaagactgaccacttgcatatattaaacagtctaatgatttaatgtcaccaaatgttttgtcaatatcaattgtttgagataaatccgcttgtataaaacgaactttatcatcattaaatttgctagttaattcatttatatcagtacgataatattgcacataaacttcaaatccatcagttaataattgtttgactatctcagaaccaattgaaccagaaccacctaatactaatgctttcattactttttaatctccaaacgactatcgacttgctgatctaaatttaaatataacgatgacgtttcgttaatactatctaacgtgatattttcaacaatgtctaacatgtcaaacacgctaacaccttcaaaatacaatttagtatattgattagcaatatattcaggtgagtttaaacttgatatgaattcacctataaattgctttttcaaaagttcaaatgcttctgcatcttggaaattgccttttttatcacgcaactcatctaataataatttttttaatttatctggttcttcagtagcacttgtcacgattgaaaaactatacgtcggctctagtacaaattgataaccaaatgtatcatcgataagtccttcgtttaataaattctgataaaaatctgtttcttccccaaaaattaactcaaagaataatgacatttctaaatcacgttgtacatatttttgaggcgcttcttgtaatggtttatttttaaaaccaagcattagtcttggtgattgaattttcatagattcagtaacaaatgcttctttaacatcctccggttcatcaacaagtcctcgttcgattttgggttggttaactttattacgagcatcctcgtgttgttttactattcgacatattgcttcaggatccacatcgccaacaacaaataaaaccatatttgatggatgataaaacgtttcataacatagatacaaatcatcttttgtaatatcgtatatactttctacactaccggcaatatcaacacgtattggatgttgttgatacattgcacgcaatgtatcaaacattaatttatatccaggttgctcttgatacatttttatttcttctgcaataatacctttttctttatcaacagtttcttttgtaaaataaggcgtttcaaccattgtaagtaaacgtttaatgttgttttcaatattatcagttgcactgaacaagtagcttgtacgatcaaagcttgtaaacgcatttgcttgtgcgttatcttcagcaaacgcagtaaataagtcttcttcttctttttcaaataatttatgttctaaaaagtgagcaactccatcaggtacagtaacaaattggtcttgtccaaggggtttgaattgattatctaatgaaccaaattgtgtagtgtaagtgacaaatgtcttttgaaaacctggtttggggataataaataatcgtaaaccattttctaattcttgttcgaatactctttcgtctattaattcataataacgctctttcattatttatcccctccttttgtcaacacatagattgtatctaaaaatgctttttcagcaacagaaacaatatcttcgcgacttaccttctgtatatcatttataaatgtttctttgctttgtggttgctctaataatatttggttatgcataatctctataatacttttcggacgatcttcagattcatatcgatgagaaatgattacttttttagctaactctaatttttcttcagtgaaatctcctgcttttattttttcaaattcacttataatagtgtcttttgcagtttcgtacttatcacttgaaaccccactcaaaacaaataaatagccatttttgccatcaatttgtgaatgtatagagtacgctaaactttgcttttctcgcacttcattaaataaaacagatgaaggatctcctccaaacatcatgttaaatacaacaaaggcagcatatccactttgtccatattgtgttggaaaacggtatcccatatttaatttagcttgatccacgtcatcatattcaacaatataatcaacttcttcatcgtgtaaatgatgagtagaatgttggaattgatgtttatcgaatggtttaagtgcaaatttttcacgtatttgtttctcaacactttcaggttctacattgccgacaacataaacagaacattgatcattattaatcattgattgatatgtatgatatagtgtttcagcagtaatatgtgggatttgttctagttgtcctgtagataagtatttatatgcttcattttcaaacatatggtcgagtaattttaaaaacgaatattgtgctttattatctaccattgcttctatttttttggctaataatgttttctcttggttaacaaaattatcattgaatgctttattttcaattaatggattccaaatgatttcttgtaataaatctaatccttgattaaataatgattcaccgtttcttaaataacgttcattaacaatttctaatgaaaatgtaatgacatgctgatctttgaattttgaaattgtactattcacatacgcaccatataaatcggctaagtgattattaaacgacttatcggttggccatttcttagttgctcgaactaataatttgcttaataatgatctagctgttattgtgtcatattctaaaggtgccataaatttaaaaactatagtagttgttttaaatttagttgttggtgaaactttgatatgtatatttggttgagattgtctactcaaatatatagcctcctctatatcttcttacatctatatttttctagtgattttaaattgaactaagctatttttcatataatttaatgaatacaaaataggttcatctgattcattatagtgcgtaatttttaataaaatcaaaccttcgtgtggcgaagcattcagtacttcggatattcgaggttcataatttaccgcttcaatttctgtatcagcataacaaatattatgattactttgttcttttatcgcacttagaatcgatccattgctcatttgatactctgtacatgttaattcttttttagcaattttatctaaacaatagacgaccggttctccatcggcagttcgtaatcgttctataatggttactggatatccttcttcaacgctcaacaaatttgcatctaacatagttgctggttgctcatcaaaatttaagtattcagttccgcattcaaatcctgcatttttaatcatttgcccaatacttataagttcattcaatggataaaagaaagggggcagtgacttaacacttgtgccctcttcaaaattatctttaatgacttgttcagtaatcaatgcctgaattgcttcataaacatcgtcggtttttacatttaattctctggcaattgataaattacttggaagttggtcaccatattccaatttattttgcttaatcaaatttaaaatgtattgtttaacgttatataccgcattcatttctgacatttttttacacctcgtcattattaagatctattaaaacttgtctaggcttgcttcctttttgtggaccgattacctgattgcgttctaaatcatccatcaacctagatgctctattataaccaattctaaattggcgttgtaacaatgatgtacttgccttttgttgttcaacaacaaacaaatacgcttcatcatataaagcatcttcacttttcatttccgatttatccactggtgcatctggttccatttcttttacataatttgcctgttgttgttctactacataatttacaacatcttgcacctcttggtcacttaaaaacgccccttgaatacgtgtttgtgatgagtcaccatttccaacgtataacatgtcacctttaccaagtaacttttctgcgccgccagtaccaataatagttcttgaatctgtttgagaactcacagcaaaagctattctagatggaatattatttttaatgatacctgtaattacatccacagaaggtctttgtgtcgctacaattaaatgtatacctgctgcacgtgccatttgtgtaatacgttgaatcgcattttcaacttctttaccagctaccatcattaaatctgcaagctcatctacaataacaacgatataaggtaattctggttgcttctcatctaattcttgattttgcttacggattaattcgttataacctttaatgtttctagttgatgaatgttggaataaatcataacgtctttccatctcagctacaattttttctaaagcttgagcagctttatgaggatttgtaacaaccggaattaataagtgtggaattccgttataaacatttagttcaaccattttcggatcgattaacataagtttaacttcatgcggcttagcatttaataaaatacttgtaataataccatttatacaaacagatttaccactacccgtcgatcctgccaccaataagtgtggcatttcatttagtggaacagtaattggatcacctgatatatctcttcctaatccaacttctagtttattattagacgggaatttttcatctaaaacttcttttagtgaaactaatgaaattttctcatttggcacttcaatacctactgcagaacgaccaggtattggcgcttcgattctaacatcttttgctgctaaagctaatgcaatatcattatgcaagtttacaattttactcactttaaccccttgagctggttgaatttcatattgagttactgcaggaccaattttaatttgtgtcacttttgcatttaccccaaaatcttttaatgtattctctagtacttgtcctttacgttgcacttcagctttagatgttgctttttgttttgcaggttgattaagtaaagttaacggtggaacaacatacgatacattcgtaacttcaccagcttcttcaatagtgttttcactttcaacactgttatgagtttgttctgttaattgttcttgctgatctgcttgatgatgatttacgatgttattcgaactattctctgcatcaaacactcgtttttttcgacttggttgactctggcttttactttcattttcagtatgcccataaattggaatatctctttcttgaggcacttccgtaaaatcactcacatcttttatttgtggctgttcattttgacgtgccttttgttcttctttaagtcttgctttttcttcacgcttcaattgtttttcttggtttctttccgacattttttcattaaatgaaccaaaccaagcttttatattttccagtgcaacttttgcaacttcacgatgttgatggtttgttaataaaataacacttgagcataataataaaatagtaataatacatacaccaaataatgaaattaaaggtacgcttaactctaataaataaaagcctaatacaccgccaccaaaatttgggaaatgactgtgttggtatgactgatacacataagaaagtacaggttctctttcagctttgataccactattaaaatgaaaaactaactgtgatacaaatagcaatgcaatttgcaatacaatcgaaccagccgttcgtctagttttaggaatacgtttagagtatgtaataaaaccagttgctaagagtactaaaatatatgttaaatatctactgtacccaaataaataattaaagaagctgtcaattagacgacctattattcctaattggaaaacacccaacaccattaatacaactactaaaatagctatgacataacgtatcggattatcattcttctttttcctcgaatttgttcttttttttgatgttgtttttttcttagctgtcgatttcttttttgcttgtgccaattgacgcacctccttatgttgccttagttaaaacgacgttattatatataatttcctatttgatgtttagaatatgtagtccaaacagacgatgaaagaggttagaacaatatcatctatgtatcaatttacttaagataacagattaatcgttaccccttcaattgaccatcataaaatataagtaaattgtccatgacaaccattatatttcagtgacttgttctgacctcttttatgttaatgactttttgattaaatttcagaaattactggaataatcataggacgacgttttgtactttcgaataatagtttactaatttgatcacgcatattttgtttaatttcagaccattctatgcgtttttcttgtaaaccagcctctactatttcacgtactttctcttctgcttcacgtaataagtcttcactttcacgtacatatacaaacccacgagattgaatttcaggtcccgcagctatacgtctatttttaggatctaacgttacaacagcaataaagataccatcttctgctaaaagatgacggtctctcaacacgatatttcctacatccccaataccaatgccatctattaaaatatttcctgaatttaccttttcatttaatatcatatctttaccgttgtaattaatgacatctcctttttccacaaggaaaatcttttctggtgcaacacctgcttcagctgctagcttcgcatgtgctatctgcattttaaattcaccttgtacaggaataaagtattcaggtttcataatattaatcatcatttttaattcttccatgcaaccatgacttgaagcatgaatctttttgttatttggaataatatgtgcgccagcacgtacaagctcatttaatgtattcgcaatgataacttccatattagcagaagccgtaattgctaaaaatacagaatcgccttcttcgatattcataattttatgcttatgttgcgccatttgacttaaggcttctacaggttctccttgcataccagtagctataattatcacttcatttttaggataattatcaacttctgttataggaattagcaaatctttaggaatgtcgaaataccccattttacgagcaatattaaatgaactttcaagtgatcttcctaaaaatgacactttacgatttagcttgctagcaatatttaaaacttgctgaatacgtataaagttcgaagcataacatgaaactatcaagcgacctcgcacttttgcaaaagcatcatacatatgatgttcaatcacattttccggagtattatatccaggtttctctgcctcagtagaatcactgattaagacaaatacgccttcttcaccaatctctgccatacgtttaatatctggtgcataatgtccatgtaaactttggtcaaacttaaattcacctgtatacacaatggcaccatatgaagtgtgaatacaaacacctaaactatcaggaatactgtgtgtcgtattaaagaaactaatattcacgtttttgaatctcataattgaatcattattaactgtatagtagcgaacttttttatcaatattacgggctttcatattttctttaattaacgctattgtcaatttagatccatatactggtgcatctaattgttctaaaacataactcactgcaccaatcgcgtgctcatgtccgtgtgtaaggaatatacccttcaatttatctttattttcaagtacgtatgaaatgtctggtataacaatatcaatacctagcatttcgtcttctggaaacataagtccagcatctaacataaacatttcatcgtctacttcaacgatatacatatttttagcaatttcgccaacaccgcctaatggtataatgcgaatatctttattctttttctttattaaactcaaaatcttacctcctaaatttgttacccgtccatatataaactcactattcattataagttaaaaaacacttgatgtacactattaatcactatacatacaggataattaacagttgcacacaaaataataaagcgttttaaaatgttcaatacaacaaattcaaaacgggtcacttcgtaaaaagtggcataaaaaaatcacatgacgatacattgtcgtcatatgactttaaatattattcttctaatgctctatgtgaagcatttactcgaccttgtttatcaatttcagtaatcttaacttcaattgtgtcaccgatttttaatacatcttccactttttcaattctattttttgaaatttgtgaaatgtgaagcaacgcatctttacctgggaataggcctacaaacgcaccgtatttttcaatacgtttaacagtggcttgataagtttgacctacttccgcttcacgtgtaatttcctcaatgatttcacgagcacgatttatcatagcttgatcaacagcaccaataaagatagtaccatcttgttcaatatctaatttaacacctgtttcatcaataatttcgttaatttttttaccaccaggtccgataacatctctaatcttatctggtttaattgtcatagttacaacttttggcgcgtaagcacttaattcagtacgtggttgatcaattgtttgtaacatatgattcattatttctaaacgaccacgtctcgcttgttctagagcctcttcgataatttcacgcgttaaaccgtcaattttaatatccatttggattgctgtaataccttctttagtaccagcgactttaaagtccatatcacctaatgcatcttccataccttggatatcagttaaaatcgtatagctatcttcacgtgtaacaaggcccatagcaataccagcaactggtgctttaatcggtacgcccgcatccattaatgctaatgttgatccacaaattgacgcttgagatgatgaaccatttgattcaagtacctcacttacaatacgaattgtatatgggaaatcagcagtatcaggaataatatattttaatgctctttcacctaacgcaccatgtccaatttcacgacgacctggcgcacgtactggaccagtttcacctactgaaaaattcgggaagttgtaatgatgcatgaatcttttttcttcttcaggtcctaaaccatcaattaattgataatcgcctaaagcacctaatgttaaaactgaaagtgcttgagtctgaccacgtgtaaatagacctgaaccatgcgttctaggtaaaataccaacttcagaatctaatggacggatttcatcaggtttacggccgtctggtctaattttttcatctgcaattaaacgtcgaacttcttctttcactaattcatttaaaattgcataaacttctttaataagtaattcattctctggatcttcttcatcgataaattcattgacgatttcttcttttaagttatcaagattttcatctcgttgttgtttatcaaatgttaaaactgtttctttaagtcctttttcttcggttaaagattttacacgttcaactagcgcttcatcacgctctgctggaataaattcttgtttaacaggttgaatgtggtcgacgatttgttgttggaaatcaactaaacgttgaatctcttcatgaccaaagaaaatcgcctctaacatttcttgttcagtaatctcactagcgcctgcctctaccatgtttaccgcatctttatgaccagctacttcaaggtctaaacgagaaacttctttttcttctactgttgggttaatgatatatttaccgtcaatataacccacatttacaccggcgattggcccttggaatggaatatccgacacactaagcgccatagatgaaccaatcattgcagccatttgtggtgaacaatcaggatctgcacttaataccatgttcataatttgaacatcatgcttatatcctttagggaataaaggtctaattggtctatcaattaatcgcgcagttaatgttgcatcgtcaccaggacgtccttctctctttttaaatccaccaggaattttacccgcagcgtacattttttcttcatagttcactgttaatgggaagaaatctccatcacgaggttcttttgatgcagttgccgtcgataacacgactgtatctccataacgaaccaatacagcgccatttgcttgtttagctaattgccctgtttcaatcgttaaagatcttcctgcccattcagttttaaaaactttcttttcttgagacattataaatctcctctcttgaatctaatagttatatcatatcatttattatcgtattttaatattagttataaaatattgaattggaaaaaaagagagcgggatatccatctattatttacaaaatagacttatcgtcccacccttatcagtataaatataagttatattttttaaaaaaacatactttatttttaatatcttgattattactctaggtgtacttatatcatctttatctcattgtaaccttattattcactcaatattagcttaacatataataaatgttaatatttgtaaaaagcttttttaatataaattaaggttggaacataaatatgccccaacctcaaagacgttatattaagattaacgacggataccaagtgatttaattaattcacggtaacgttgaatatctttactacgtaagtagtttaataaatgtctacgacgacctaccatttttaataatccacgacgtgaatggtggtcttttttgtgtgtacgtaagtgttcgtttactgcgttgatttctgcagtaagtacagcgatttgtacttctggtgaaccagtatcagtttcgtgtacacggtattctttaatgatttcgtttttacgttcttgtgaaattgccataatcaatttcctccttaaaatgtttgaatactccttaatccgagttaggcgttggagattcgacctactaagaaaaaggtgtggtatagattgtttatataactatacgcaactctagatattataagctacttcatcaccaaaatcaactgctaataaatatttagcacgcgatttatcatcgttcatttgtttaactaatgggtcgataccatcaaatttaatctcaggacgtaagaaatgatgccaattcacggtcactcgttcaccataaatattatcctcaaagtcaaagatattcacttcgatgacaacttctgctttgttaggatcatgaaatgttggctttacacctatgttagctacccctcgatataatttattttcagtgccgatttcaatactaacagcataaacacctttacgaggtaacaaataatcatcactaggttgaatgttagctgttgggaagccaatagttcttccccttttttcaccttgcactacagtgcctttaatagaatatatatagcctaaagcatcattcgctttttgcaactcaccattgattaaatcttgacgaatagaagttgtagaaattttttcattttcaatttcttgtttactcacaattgtcgtattaaacgcatcatattcttgaagtacagtcatattaccttttccaaatttaccaaaagtaaaatcaaaaccagcaatgacttcttttacattatttttaattatataattttcaacaaaatcttctacgctcacattagcaaacctagatgaaaaattaaccactatacaataatcaatatcatgttggctaattttttcgattttatctgaaagtggcgttaaatacgttgttcgttttcttttaggattcaacacgacagacggatgcggatcaaatgtcatcaccgctttttttaaactgcgtgcctcagctatttcgtttaatatatcaaagactttgtcatgacctttatgcatgccatcgaaaaatccgaatgccattgcaacatcctctgtaatatactgtttagattgtataggatgtgtcacttctatgactttcataaattctatctcctttaattaaagacttttttaggtttaatttctgattcttttgtagggtgtaccatataaattgctaatactttttctgaatcatcatcaataaatacaatttggtctttaattttgttatcaaattcatttttattaaatttctgcccatttaaaatacgtttttttatgtgcgaatctttaattttaatgcttggcaaaccctttaatccatattctaaaggaaacaatttattttgcaatgaatcctgctcatgaagttcttttatttgttctaatgtaaggctatctttcaacacaaatccaccagactcgattcgtgttaatttcgacatatgtgccggaaagcctaatttcacaccaatatcagttgctagcgttctaatatatgtacctttaccacagatgacgcgtattttaaaatgacactcattttctttaaaatctaattcagatatacgcccaatgtctttaatattaactttacgctttggtctttcaactgtttcattattacgcgcatattcatataattttttaccatttactttgacggatgagtacatcggcggaatttgttcaatgatacctttaaaactttctaacaatcggtcaatatcgtccttattaaaatctgctgagtgtacaccttttgtttccaatgtatcacccgtttgatcttcagtcgttgtacttcttcctatcgatacagttgcttcataagctttgcccatatccataacataatcactaactctcgttgcattacctatacataccggtaacacgcctgcaacttcgggatcaagcgtacccgtgtgacctatttttttagtttttaatattttacgcaatttgaatacaacgtcatgacttgttaaaccgcgctctttatatactggtaatatcccattatacatatagtcaccttcttttttaaaatatattttaatagcgtatcaactaaatttattcataaaaaaactggaaaatgttaactatttctacacatctatgtattaactgtttaatgttaatataccgatattaagaaattatcaaacattttccagatacctaacactaaattatctatcttgtttgtgtaaatcttgaatcattcgttcaattttattaccatattcgattgattgatcatattcatacattaattccggcataatacgtaatcgcattctagaacctaattcagacttaatgaagccttttgctttatcaagtgctttaaatgtattttctacttctttatcgttacctaatacagttaaaaatactttagcctgcgataaatcatttgttaaaacaacatctgtaattgtaataaaaccaactcgaggatctttgactttattgttgatgatatccattaattccttcttcatttgttcaccaacacgctctgctctcatactgctcattcttgtcacctctttatctttaagttcaattgttatttgcattttttagtgtaacaatgcttaaacaattattttagctcacacgttattttaataaattaagcctataaaatcaaataaagtttgccgtaagataggcatttcaacagaaaattttccaataatagtcgacattatattttgtcattaaaaatcattctaggccaccacaaaattttatacaaaatcatgtccatataacgtaacttttaataggtaatctattctaataaaaaaccaaaagctagtatcaaatatgctccctataaagtagacacttaaaaagtgcaatatttatagggagcatatcaatcttaactatacttttagcttgtaatttatttaattaacgcttaatttcaaccatttcaaatgcttcgataacatcgccttctttaaggtcattgtagttttcaattgtaataccacattcataaccttttgcaacttccttagcatcatctttgaaacgtttaagtgtatctaattcgccttcatattgaacaataccatcacgaataatacgtacaccagcatttcgcgtaattttaccttcagtaacataacatccagcaatagtaccaactttagaaactttgaatgtttgacgaacttcagcttgtccgataacttgttcttcaaattctggatcaagtaaacctttcatcgctgattcaatttcttcgataacattataaataactctgtgtaaacgcatatcaacattttcagcttctgcagcacgttttgcaccactgtctggacgaacattgaaaccaatgataataccatttgaggcattagcaagtgtcacgtctgactcattaattgcaccaaccgctgtatgaatgatacgaacatttacgccttcaacatcaattttcattaatgatgcagctaaagcttcaacagaaccttgaacatcacctttaataataacgtttaaatctttcatttcaccttgtttcatttgttcaaacaggttatctaatgaaacatttttactttcttgacgttgttgtataatgctagcttcgtgtcttgattcaccaatacgacgagcttgtttttcatcactaaatacaacaaagcgatccccagcttgtggcacatcattaatacctgtaatttcaacaggcgttgatggaccagccgttttgattctttgacctaagtcattaaccattgcacggatacggccgtaagtattaccaactacaatcgcatcaccaacatttaatgtaccgttttgtactaataatgatgcagaaggaccacgtgatttatctaattcagcttcgataactgtaccaacagcacggtttttaggatttgctttaagttcttgaacttctgcaactaatcctatcatttctaataaatcgtcgataccatcaccacttaatgcagaaagtggaacgaaaattgtttcgccgccccaatcttcaggaattaaaccatattcagttaattcttgcataactcgatcaggatttgaagttggtttatcaattttatttactgcaacaataattggtacttctgcttctttagcatggttaattgcttcaattgtttgtggcataacaccatcgtcagctgctactactaaaatagtaatatctgttacttgtgcaccacgcgcacgcatcgttgtaaatgcagcatgtcccggtgtatctaagaaagtgatttttttgccatcgttttcaatttgatatgcaccaatatgttgagtgattccgcctgcttcacctgctgtaacttttgtatgacgaattgaatctaataaagtcgttttaccatggtcaacatgtcccataattgttacaactgctggtctctcaattgcctctggatcatctttttcgtcttcgaaatagattgataagtcttcttcattaatcacaacttcttcttcaacctcaacgccataatcatcggcaattaattcgattgtttcttgatttaatgattgattgatattagcaacaataccaagtaagaataattttttgataatttctgatgattcaacatttaatttatccgcaaattcgcctactgtaataccttcttgatatgtcacttttgatggtatttcttttggagcagctggttgattttgtggtttattattcttgttatttttcttattatttctattattctttttattgcctttgttgcctttattattttgttgttgattctttttgttatctttttgttgccctttattttggttttgattgtttgatttttggtgattattttgagtgctttgtttattgtcgttcttttgttcttttttgaactttttatctaatgctttaatttggtcatcttccaaagcttgcatatgatttgaaacctcaatattcatgctttttaactcatctataatctctttactctttagatttaattctttcgcatattcgtaaattctttgtttactcatataatcactccttatgatattcatctatcattgatagcaactttttagcaaagcctgggtcagtaatccctacattaacacgctcaccttttccaagtgctattcccaattcatttcgatttccaaactttctgaatggaactttgtaactcttacatttatctgtaattaatttagctgtattatcagacgcatcatttgcaacaataacgagcttcaaatttccttttttaatctcattaacaatgactgattcacctgtttttactttaccagctctcattgctaatcctaaaaagtttaatatttgatctatactcattttgggatctcttctctataaattaatctaataatttctttgtaaacaggatccaattgctctttagatgctttaaaatatttttctaaaatttctttttgttgtgctttttcaaccatagcaacatctttagaaacatatgcgccacggccttgtttctttccagtaacatccgcaaagatttcgccttctttattaacaacaacacgaatcatatcttttttgggatgcatttcatttgaaagaatacattttcgcatcggaatttttttctttttcatagatacttcactccaacctattattcagattctttctctacatttgtttcaactgaaacatcatttacctcttcggttgattctgttgtgtcagcatcttctaaagcaacatcttcttcagttactttttcagcttcaactactggatagatacccgcttcacgcgcatctgtttctgatttaatatcaattttccagccggttaatttagcagctagacgtgcgttttgtcctcttttaccaatcgctaatgacaattgataatcaggaacaacaactactgtagattgatttgtttcatcaacaataacttctaaaacttgagaagggcttaaagcattttttacaaatacttttggatcttcattccattgaacgatgtcgattttttcaccacctagctcttcaacaacagcttcaacacgtgcgcctttagcaccaacacatgcaccaacagcatctatatcattgttttcagagaagacactaattttagagcgatcgccagcttcacgtgctactgatttaacaattacagtaccatcgtaaatttctggaacttcttgttcaaataaacgttttaataaacctggatggctacgagaaacatagatttgaggaccttttgtcgtttgttccactttgttaacatatactttgatacgttcgttaggaatatatttttcgttaggacttctttctgcttcagataaaacagcttcgatacgacctaaattcacatatacataacgatggtcaacacggtcaataattccagtaagtatgtcttcttctttgtctataaattcttcaaataaaatttcacgttcagcatcacgaagacgttgcattactgcttgtttcgctgcttgagcacctacacgaccaaaatctttaggtgttacatcttcttcgtatatatcaccaatttcatatgcagggtttttaacaagcgctgtacttaaatccacttcatctctgtcgtcaaatacttcttcaacaacatctttacgagcgataactttgaaagtaccttgatccatatttaattccacacggacatttcttgcactatcataattctttttgtatgcagtaattaaagctgcttcaatagcatcaattaatactgctctaggaatcttcttttctttttctaaatactcagtagctaataataattcattacttgacacgttttttcctcctcatcacgttaaatcataactgcgtgacgtgcttttgctattttgtctctcggtatctctatatctttcgttcttgctttgattttaacttgtactacaattgtttcattattgacttcttgtaaaatgcctaaccattccttttcaccttcaattggtacatataaagaaacaaatacaggtttagttattgcattttggaaatcttgttcttttttaattggacgttctgcaccaggtgacgctacgtctaaataatacatttcaggaataggatcatttgcatccatagcttcacttattttttcagaagctagcgtacaatcatttaaatctacgccaccttctttatcaatagagattctaagaaaatgatctctaccctctttgacatattcaacgtctacaagttcaaaattcaagtcttccataattggtttaacaatcacttctacttgttctgtaattttactcatacaggcctccctttttggcaaatagaaaagagcgggaatctcccactcttctgcctgagttcactaatttttaagcaacttaattatagcataagtttatgcttgaaacaaatgacttcactattaatcagagattcttgtaaaagtttattcctttatttcaccattacatttgaatagactcgtaagacattgaaaagaaatacgggcataattttgtgtccagcaacaattttgtatttctttgactacgccatacgcattaaataaataccttgattatttcattttacatatcaaatatcgaaagttgagctttatctggtaaattcggtaatgagcctaactcatctaaatactcaataattttctgagataatccagcttttttgtttaaatcttcttttgataaaaatgggccatcgtcacgagcttcaacaattcgtttcgcaacgttttcgccaagcccaggcactgatatgaacggcggaataagtgtatcgccttcaatgataaattcgaacgcctgactcttttctaaactaatcggttgcattcgataacctcgatgcgccatttcattcataatttccaagactgttaatacgtctttttcttttttacctagatccatatagcgagaatacatgtcttttacagtatttcgaatgcttgttttatctttaatcatcgtgattaaatcaaagtctgacgcacgaattgtaaagtaagatgcatagtaataaagtggatgatgtactttgaaatatgcgatacgtactgccattaaaacgtatgctgctgcatgggctttagggaacatgtacttaattttaagacatgaatctaaataccaatctggcacttcattttctttcatcgtttcaatcatttcttcagttaaacctttacctttacgtactgactccattattttaaaagccattgatggttctaaaccagcatacattaaataaaccatgatatcatcacgacaaccaattacacttgataaatcacatataccggttttaattaattcttgagcattgcctaaccacacatctgtaccatgagataatcctgagatttgaactaattcagaaaatgttgttggctttgtatcttctaacatttgacgcacgaatcctgtaccgaattctggtaccccaaatgtacctgttttacataaaatttcatcttcagtaacacccaaactttcaggtgtactaaatatctgcataacttctttatcatctacaggtattgtttttggatcaat

SEQ ID NO: 4 - DNA, 2980548 bp, Staphylococcus aureus Bmb9393 (residues 1,490,275-2,980,548 of 2,980,548)
tcctgataaatcttgaagcatacgaatcattgttggatcatcgtgtccaagtatatcaagttttaatacattatcatgaatagaatggaaatcaaaatgtgtcgtcatccatgctgaattttgatcatcggcaggatattgtatcggcgtaaaatcataaatatccatgtaatcaggtactacaataataccccctggatgctgtccagttgtacgtttaacacctgtacatcctttaacgagtcgatctatttcagcacctcttttgtggataccttgatcattcaaataacctttaacataaccaaaagcagtcttttcagcaacagtaccaattgtacctgcacggaatactttatcctcaccaaataatacttttgtgtagttatgggcattcggttgatattcaccactaaagtttaagtcgatatcaggaactttatctcccttaaatcctaaaaatgtttcaaacggaatatcttgtccttctttaataagtggcgctccacaagtttcacacgtcttatcaggtaaatcaaatcctgatcctactgaaccatcattgaaaaattcactcgttttacagttcggacaaatatagtgtggcggtaacgggtttacttcagtaatctcagtcattgtcgctacaaaactagaacctactgaaccacgggaaccaactaagtatccatcatctaatgattttttaactaaacgttgcgaaattaagtaaattaccgcaaatccattaccgataatactttttaattctttttctaatcgatcaattacgatttgaggcaggtcttcaccatacagtttacgcgcatttgcataacttagttctctaatttcttcgttagcaccttccatacgcggtgtgtataattcatctttaataggaacaacacgttcaattcgatctgctaattcgtttgtatttttcacaacaatttcatgcgctttttcttcacctaaaaaatgaaactcgtttaacatttcatctgtagttctaaaatgtgcttccggtaaagttgagcgattaagtggattgccgggttgtgatgctattaaaattttacgtgcgataccatcatgttcaaacaaatagtgtgcatttcctgtcgcaataacaggtatacccgctgtgtcacctgcatgtattaaacgttgataaatttcatgtaatgtttcagtatctctaataagctctctatcaattaaatcttgataaagtgccggtggttgaatttcaataaaatcataatatttggcaattttttcaacttgactctggtccttctgcataactgccgtaaataattcaccttcatcacacgctgtacctaccaataatccctcacgatattcatctaacaatgaacgtggaattcgaggtgtacggtagaaatacttcaccaatgatgcacttacaattttaaatagatttttaagaccttgttggttttgtacaattaatgtgacatgactaggtcttgcacgtttatatgcatcttcattactgagttttttgttgatttcgttatgatttaatacgcctaattctttcatttgttgaaccatttttatgaaaatgtaagctgttgcttctgtatcataaatggcacggtgatgttgcgttaattctacgccatattttttagccaagaaattcaaaccatgtttaccatattcagtattaatcgtacgagataattctaaagtatcgataacaccattcgttgatggtccaaacccaagacgttcatatcccgtatcgatgaagcccatatcaaacgaagcattatgcgctacgaatatcgcatcgccaacccattctttaaactctgtaagtacttcttcaatctcaggggcatctactaacatatcatcagtaatatgcgtcaaattgataatcgtttccgataatcgttcatgcggattactaaacctttcaaacttatcgatgatttcaccgttatgaactttcacagctgcaagctcgatgattttatcatactgatttgataaaccagttgtctcaacgtcgaacacaacataagtagcatcttttaatacgacatcttgtggtttgtatgcaatcggaacaccatcatcaactaacataccttccataccgtatatcattttaatgccatgtttttccgctgctgcgtgagcatctggaaatgcttgcacaacattatggtctgtaaccgcaatggctggatgtccccagtctgctgcctgtttaacatacgcaccaatattgggtataccatccatttggctcattgcagtatgcaagtggaattctacacgcttttcttcagccttatctttttttgtcgcttttttaatctcttcaatatcagacatcatcataactaaatctctaataaatgtatcttcttcaatacgaccttgagccctaacccatttaccaacacttagcgctttaaaatgttctaaatcatctttgtttttacgagtaaacatttttaaaactaaagagtccgtatagtcagtcactttaatttctacgatatggcgaccacttttaagttcttttaagtttatatcaaaaatgacaccctctattgcaactttaaactcttcctcaataatagattcaattggtttaatattttcaatttgaatcggcttaccaatttgacacttatcgacagcactttcgttgttatcttgttgttttgctttttcagctttcattttttcaagtttctctgttgccaatcgtgcactttgttcgtcttcttcttgaatatgtgcttctaaagaagctaagttttgttcttgatcattatcatttgtttcgaatatgattttatcgatatcaaaaccacaatttctaaacgctttgataagacttccattacatgccttatcaaaatgattacgttcaatgtcatttgataccattacttttaatacttttccagacataataagctttttctgtttcaattgacctttaacttttggagataaagctgtttggtcaatacagtgcccaaagtatttaattgcatgttcatcttgattcgtgccatttgttaccgtaaaacgacatgtaacgttggcgatatctttaaactcttgctctattgcatttgtaaataataaataatcttcatgagctaagaattgtggtaatgtaatatgaaattcccatgttctgtttttgttagaaacatctatacgtgtcagttcacctgaatttaaaatttcagcatctaattgatttgaaattttaatttgatcagcaagcactttaaatttttgttgctctgtcattgccaagacaattaccaccttaaatagaaattacttttacgtgttcgaacaatatttagattatgtgagcatagtaatgatagaaaattaaatgctttatatttggctaatcattatattgttaaaacaaatttatctttaattatactatgtcttcagtcatttttcatcgaataatcattatatcaaaaataataagagcaggacataagcatcagatttctttcagctttttcctactcttataattcattcgatcttaattattttaagttatcatatttatttgtaatgacagtcattaagtcatcaatgtgaacttcttcgctatcacctgttaaacgttctttaacttctacaataccttccgatgcacgtttaccaacaacaattcgcagtggtaaaccaattaaatcggcatcattaaatttaacacctgcacgttcctgacgatcatcgtacaacacatcaaatttagtattaaattcagcatatagtgcatctgctagttctcgttgatcatctttcttaggattaatagaaattaaatgtaaatcaaacggagtaactgatttaggccaaacaattccattatcatcgtgattttgttcaacaatcgcacttagcgttctagaaattccaattccgtaacaacccataattaaagattgagcttttccttggttatctaagaatgtagcattcattgattctgaatacttagtacccaatttgaatacttgaccaacttcaataccttcagcaaaatgtgcaacgcctgaaccatcacttaacttttcgccttctaaaataaaacggaaatcgccatattcatcaacgttgaagtctctacctacatttacattaattaagtgataaccatcttcgttagcaccgacaactaaattatttaaatcttgcacaaaattatctgcataaattttgatttctttatcaattacaggacctagtgaaccaggatttgcaccaactaaattaacaatttcgtcttgtgttgctaattcaatattatctgtgccgaaataagattttaatttaatgtcattaatttcatgatggccacgcactaaaaccataatatattcgccatcaactttgaaaatcatcgttttaacgatttcatctactggtctacctaagaagtctgccaattcttgcgcagtcttaacatttggtgtttcaattttttctaaaggttgcacagtagtatgcttatgatttggttcgtaaacgacttctgctttttcgatgttagcagcataatcactttctttactgtaaacgattgtatcctcaccgatagcacttaatgccataaattcatgtgtatggctaccgcctatagcacctgaatctgcaactactggtcttgcgttaatgccaactctctcaaaaatacggctatacgcttgatacatatcttgatacgtttgatctaatgatgcctcgtcagcatggaatgaatatgcatctttcataataaattcacgcccacgaagtaaaccaaaacgtggtctcttttcatcacggaatttagattgaatttggaataatgtcatcggtaattgtttgtatgatttcaattcatttcttactattgatgtaactaattcttcatgtgttggacctaatgcaaattgtcttccatgtctatcttgtaaacgcattaattctgggccatatgcaccccaacgtcctgattcttcccataattcagcttgttgtaacgctggcattaaaatttcaacagaatcgatacgttccatttcttgtcgcacaattgcagtaatattatttaacacacgtgttgctagcggtaaataactataaatcccacttgtactttgttttatcaaacccgatttcaataataaacgatgactttgtgcttctgcttctgatggcacgtcacgcatcgttggtataaaaactttggattgcttcataattatttatcctcctaaattataagaaatatcgtcgaatatcattccacgttactaatatcattataacgaccatgaaaatggcaccaatagcaataatcgttgtttccgcttttttattaactggttttctgaaaatcgcttcatatataacaaataaaatacgaccaccgtctagtgcaggaataggaattaaattcataatacctaagtttacacttaataacgcagtgtaaccaattaagctaatgatacccgctttaacaactgagtcgacgttatgataaataccaaccggaccatttaacatatcaaatgagaatccgcccgtaaatatactagccaacatacctactacagctgtaaaaatataagtactaccgattaaaaagcttttaaatccgaatacaattggtttaaaaagtgtatgttcactcgctggttggaatccgagaacatacttcgtctctgaacttactttagtcagttttttttcagtctttttaggtgttaattcaactgactttgttttaccatcacgttcaaatttaacagtcgtcttattatctttaactttatctaacgccttatcaacatcatcaaattcagatattttatatttgccaatttggacgatcttatcacctttttgtaatcctgcttgttgagctggatacttatctgcgacttgttctacagtagacgtaggcgtgccttgataatatgcaagaccaataaataggactaaagctaatataaagttaaataacggtcccgcaaataatgttaaaaatttcggccatggctttttatgtgcaaattgtctgtctctcggagcaatttgaactaagctaccattttcaacaaagaaagactttctagcaattttaaaatgatgtctttcattatcataagcagtgataccttctatgaataagtcatccttaaaatcacattttttaacttcgatcgcttcaatttgttgaaacttatgatgatcatctaatatgatatgtgttatttcattttcttcattaagtttaattttaacgttcataccgggctcgactggtggctcttctaagccatctcctgccatacgaacatatccaccaacaggcaataacctaatagtgtaaagtgtttcattttttctaaaactaaaaatttttggccccataccgatcgcaaattctggacacataatgcctgctcttttcgcaaaaaacatatggccatattcatgaacagttactagtacaccaaaaacaataataaatgcaattattgtaactaaatagctcactcgctacacctcgattgtttataaatttcttttattttaaaaatgattgctgtatacgtaacataagtcattataatatgatactgacaaatcacaaaatataacgtctaattttcaaagttaatattgcgtataattttcaaaaggagttctgagattcattaaattatctcagcaactcctctttacgtttattgatttgttctcagcattaagattgtattaataaaatatttaataatggtaacacaaacataaagctgtcaaatcggtctaaaataccaccgtgtccaggtagtattcgacctgagtctttaacgccgaaatgacgcttaaatcctgattccactaaatcacctaattgaccaaataaacttaaaatcaatgtcactccaagtaatatccatacattcatattgaaatctacaaaatataacattgcaagtggtactatcaaactacagaacaagccacctatgaatccttcgattgttttattcggacttattactggccaaagcttatgtttacccatcattttaccaaacaagtaagcccctgtatctgtaagccaaacaattaaaaaggcatataatatgtaatgtaatccttctgatctcgtttcataaaagaacataaaaccaatgcctacataagccacagacattaagcaaaatgcagcatccataaaactaaatctgtttttagataagacagtataacttaatacaataaagctcattgcaattaaactttttaattgaattacttgtacccatggccctgcatgttgtggcaacataatgatgataagaccaactgcactaattaaaccaggaactgaaacaaatttaatcatattcatattcaacaattcttttaatgcaatcaatgctaatatattagcaaatatcattaacacaaggccgccttttaacaagataggcaagaatacgattaaggcaataatagctgtcagcgttctaactttcatactatactactcctcactcaatccgccaaagcgtctttgacgtgactgataaatttttatacatttaattaattcatcttcgtcaaagtcaggccataatttttgattaaagataaattcactatacgaaacttgccaaatcaagaaattacttattctttgttctcctgaagtacgaattaacaactctggatcaggatagtcttttgtcattaaatgattgtttatatatgtttcatctatgatatcactatttaaaccttgttgatgaagctcgtcaaacatatttttaatactatgaacaagttctgctctgccaccataattaattgcaaatattaattttaagccggtattattagctgtcttttctttagcattattaattgcttctatcgttgattttggcaacttatcagtaaatccaattgtttcaactttgacatttttttcaattagttccggtaagaatgtctctaagaaattgacaggcaaattcataatataatttacttcactttcaggtcttgaccaattttcagtggaaaaggcgtataaagttaagtacttaacaccaatatcactagctaccctagtaattttttttattgtttgcataccttcgtaatgacctttaattctaggcatttttcgcttcttagcccatcgcccattaccatccataataatagcgatatgttcaggtatattagacgagtctaattcttcattataattatttatagtgttctttttatttattagctttttaaacatggtctttcctccgagcctgatcatctctgtcatatagtataagttactaaacaatcattatcattttatcatactcatttaatgcattgaataagcaaataaaaaaactgtaccaaagtctgactcggtacagtttacaccagaaatgtgacatacatactgaggttaaaaattacataactttattatagcaatatacctaatgcctattatttataaagtatatgtttaattaacttgtttaaacaccatttttatgctcattgtgaatttaaattatcacatgcatctttgatttaattaaacatgcccattttaaatgttacattatcgtttaatactggcattttaatatgtcattgtatattagttttatactgacataatatctttttctttatcagcaatcatttgatcaatttcttttattgaattgtctgttgctttctgaacatcttcagtaccacttctcaactcatcttcagtaatgtcgccatttttttcatcttttttcaactgatcattcatatcacgacgaatatttcgaacagatactttagcttcttcaccaattttcttaacatctttaacgcgctcttttctacgttcttctgttaaggcaggtacagcaatacgtatcacttcaccatcacttgttgggttaacacctaagttagctgctattatcgctttttcgatgtcagctacagaagttttgtcgtatggagaaataacaagtaaacgtgcttctggaacattgatgcttgctaattgttgtacaggtgttggtgcaccatagtaatcaactgttacgccgtttaataaatttgaattagctcttcctgcactgatgttagctaattcacgtgataagctttcgattgatttttgcattcttgatttagtttcattaataatgtcactcattattttacacctctaaatttattttgtaattaacgtacctatcttttcacccataacagcacgtttaatatttccttcttccacaatagagaaaacagttaacggaatgttattatccatacagaatgaggatgctgttgaatccattacttgtaaaccttcttgaagcatttgaatatgcgttaaatgttcatattttaccgcatctttgtttactttaggatctgcagaatatacaccatctacattatttttgcccattaaaataacatctgcttcaacttctgcagcacgtaatgccgctgtagtatctgtagagaagtatgggtttccaatacctgcagcaaaaataactacgcgtttcttttctaagtgtctaattgcacgacgacgaatataaggttcagccacttgcttcatttcaatagatgttaatactcgtgtatcacaatccaattgttctaaactatcttgtaatgctaaggcattcattacagttgcaagcatacccatgtaatcagcagttccacggtccatacctaagtcactacctgttttacctctccaaatgtttccgccaccaacgattactgcgatttcacagtccattttagcaacttcagccacttgctcagcaacacttttaataattactggatttatgccaaatcctttttctccagctaacgcttcaccacttagtttcaaaactacacgtttatatttagaaatttgagccattttcttatcctctctatcgtgaatatatgtaacatatacaagtaaagaagacacagttgtcgttttattagaatgatttacattttaataaagcaacattaaaggtgtcttcttccttgttttactttatgacagattatttcatttgtcctttaacttcatccgcaaagttttcttcgcgtttttccataccttcgcctacttcatagcgtacgaagtcaacaagttttccaccttttgtttttaagaaagcttcaactgttacatcagggtttttaacgaagtcttgatctacagcacaaatttcttgtaagtatttacgtaaacgtccttccaccattttttcaacgatgttttctggtttaccttcatttaatgcttgttgttttaaaacttctctttcgtggttgatttcttcttcgctaacttgttcagaagaaacatatttagggttgattgcagcgatatgcatagcaacgtctcttgctgcttcttcgtcagttgaaccttcaacaactgttaatacaccaatgcgtccacccatgtgtaagtaagcgccgaaagcatcgttatcagttttagttctgatagcaaaacgacgaacacttaatttttcaccgattgttgaaattgcttctttaattctttcatcaactgatttaccatttggtaaagttgtttccattaaagcttcaacagtttcagcttttgtatctaatacttgattagcgatttctttaactaactcttggaaaccttcgttacgagcaacaaagtctgtttcagagttgatttcaacgataactgcgtcgttacctttagtttctacatgtactaaaccttcagccgcaatacggtctgcttttttagctgctttagcaatacctttttcacgtaggtagtcaatcgctttatcgatgtcaccatcagtttcagttagcgcttttttacaatccatcatacccgcgccagttttttcacgtaattctttaacaagttttgctgaaatagttgccattcattattcctccaataagttatcattttatatattatgattttagcattattataggcaagattgccaatactctaattgaatatttgtaatttgcctcgattttctttttaaaaaaggtgataagcattaatatcttatcacccatttaaactatatctaagtcagattcaacagttgattattcttcagttgcttctgtttcttctgatttttctttttcatctaaatcgatgttttgttctgcagctacttcttcattagaaacgccttgttgaccttctaagattgcatctgccattttagcagttaataatttaaccgcacggatagcatcgtcgtttgctgggataacgtagtcaatttcgtcaggatcacagttagtgtcaacgatacctacgataggaatatttaatttacgagcttcagcaattgcattacgctctttacgtgggtcaactacgaataatgcttgaggcattgatttcatatcacgaattccgcctaagaatttgattaaacggtcgtattcttttttaagttctactacttcttttttaggtaatacttcgaataaaccatcttcttccattttttcaatttcagaaatacgtttgattcgttttgagatcgttttatagttagttaataatccacctaaccatctttggttaatgtagaattgaccagcacgttctgcttcagatttaactgattcttgtgcttgttttttagttcctacgaataagacttgtccaccatcttctgaaacttgtttcaagaagttgtatgcctcgtctacttttttcactgttttttgtaagtcgatgatataaataccatttctctcagtgaagatatattttttcatttttgggttccaacgacgtgtttggtgaccgaagtgaacacccgcttctagtaattgtttcattgaaattactgccattataaattcctcctattggttaattacctccatagcaaactattgtaaagacaatatataaatattgcaccctttacacaatcacgtttgatatgtgtgtattggctttatagccgaaaataaatataacataatgccgtgtctaaagcaaatgtttttcaagcatttttccataaatttaaaggtaattctatcaagttaatgtgaaatatcaatttgattgaaaattagacaaaaataaagaaatgacttcaacataatcatcaaagtcatttcattgactaccgccaagataacatcgtcacgactaggacattgaattatgtcccagactcatcgacttatttacttttttctaattcatctaagaatttttcttttttaactttaatgaaagtacctttcattcctaaagaacgtgattcaattacaccagcactttctaatttacgtagtgcatttacaattacagatctagtaataccaactctatctgcaacttttgatgcgattaataggccttccgtaccgccaagttcttcaaagatatgttcaatcgcttctttttcagaataagataatgaattaattgccattgtaatagcagctttatcgcgcgcttctttttctacttcactatgcttctcacgtaagatttccataccaataactgtagcagcatattcacctagtaccaaatcattttcattaaaatcatcatgtactcgaccaagtactaatgtacctaatctttcccctccacctaaaattgggaagatagttgtacgactatctatgaataattctctgttttcaggtgggaatactgttaatacattgtcgatatcaatatttgattctgtttgtttaacttccattaatcgttctgtatattcacttggaatatgtctttcttccaacatttgaataattctttgactttttaataattcatttagactcgatcctaaaattttacctcgacgcgatacaataaatacatttgttacagttacgctactaatcgtttgtgctacatctttaaaatcaaccgcaatacctttgtgtttttgaagtaacgtgtttaactctctcgttttagataataagctcatgaatttttctccttttgtatatttttatagaataaatgcacttaaatctttatttgttgaaattgattttaatttatcatcaacatattgtggggtaatatctacaactgcattcggcatacttggtgcttcgaacgataaatcttctagcatcttttctaaaattgtatgaagtcgacgtgcaccaatgttgtctgtatcttgatttacttgataagcaatctcagctaagcgagtaattgcttcatcggtaaagtttacagtaacttcttctgtttgaagcaatgcttcatattgtttaattaatgacaattttggttctgtcaaaattcttacaaaatcttctaccgataaactatcaagttcaactctaatcggaaaacgaccttgcaattctggtatcaagtcactcggcttagatacatggaaagctccagcacctataaacagcatatgttcagtattcacagtaccatatttggtttgaataacgctaccttcaagtataggtaaaatatctctttgaacaccttgtcttgagacatcttgaccactattatgattattcgtcgcaactttgtcgatttcatctataaagatgatacccatttgttctgctaattcaagcgcttcttggttagcgctttcttgatcaattagttcatccgcataactatcagctaagattttccttgccgtctcaacagcaacttctcgctcaactttctttttaggcattaattgattcatcatctcttgcatttgctgattttgatttgtacctagcatacctaaagcaccaggatcttgttcgactttaattcttaccttttctttttcaagtttgccttcttctagctgtctcttaatttcagaacgttttgttttaatttcctcagtaggtggttcttcttcatcttcgttattttgtccgaaatttggaattgcacctccgaaaagtgactctaaaggattattcgtttgagacgctttctttttcatacttggaactaataacttaacaagtttttcattggccttagctgttgcttcatcttgtaccaatgattttttctgcgccttgactaatcttactgaaacatcaacaagatctctaaccatactttcaacatctcgtcctacataacctacctcagtaaatttagtagcttctacttttataaatggcgcgccgacaactttggccattcttcttgcaatttcagttttaccaacgccggttggtccaatcatcaaaatatttttaggtgaaatttcttgctttgattcctcatctaataaacttcttctgtatcgattacgtagggcaattgccactttacgtttagcatcattttgtccaacgatgtattcatttaatttagatacgatttcttttggagttaatcttattccagctgtatccattaatttcattcctccgtcttttaactaaaattaattgctcgtaattatttatcgtgctctgattattatagtgtttcgacaacaatattatcgttggtaaagacacaaatatcagccgctactttcaagctctcatatgccatttcttcagcagacaaatgcgatgcatggcgtttcaatgcacgtcctgcgcttaatgcgtagttgcctcctgatccaatagcgataaggtcatcatctggagcaataacttcgccagttccactgacaactaaaatagcatctttatccattacaattagcatagcttctaattgacgtaattgtttatcgcctcgccattcttgtgccaattcaacagcagctctttctaagttaccactaaactgttgtaattttgtttcgaatttttcaaataacgtaaacgcatctgctacactacctgcgaaaccagctaacactttaccttcatataaacgtcgcacttttcttgccgtttgtttcatgatgacttgttgaccaagcgttacttgcccatctccagccatagctgctttcccattatgtcttacagcataaattgttgttgcatgtaatgttgtattactcatgtttcattctcctttttcgctcgaggatgtgcatttagatacacttttcttaattgttggttagatacgtgtgtatatttaccagttgttgacaaattaacatgacctaataacgattgtactgttcttaggtctgcaccttgattcaataaatgcgttgcaaatgtatgtctgagcttgtggggatgaatctcacttacgcctgctgttcgtttaacaatatcatttaaaacatatcgtacaccgcgttcagtgattgcttcacccttcatatttacaataagaaaatcatgattgcatgactgaattggtttgaaatgttctaaataattttcgatgctttgtctacaataagcaccaaacggtacaaagcgctctttgctcccttttcctaatacggtaacaccattcgcgtaaaaatctatatcttgttttttaatatttactaattccgaaacacggatgcctgtagcatacaacaattcaagaataactcgatcccgtaaattttttgaagtgtcctcttctacagttttgaataacgcttccatttcttcttcgtaaaagaattgcggaagatatttttcttttttcggatgtactaattgaacaaatggattaataatgttctcatcaagcgtcatccaatattcatagaaagttcttaacgttgagattttacgagaaacagatgttcttttcaaatgatttgaatataaatagctcaaataatttctagcatctctgtattcaaaagtattcaactctaaatgttcttgttctaaaaattgattaaactgaattaagtcatcttgatatgatttcaatgtgtgttccgaaaaattccgttcaactttcaatgtatttaaaaacgcatcttgaatatgattcaatacatttaccctccatcaataagaattgtagcatatacagcaaagggcttacagtaatttgataatcaattctaaatcttttgagaattaaataattgtaactaatcggaaaacctgttaattagaatacctcttttttaaattaattactaaaagtctttattaatagccttgccatttattatttcattgccttttaaataaagtttatttaaaacattctcttacatgttacatcaatcaacttattgcgtgttatttatttagatattttttgaatgcgaattctaaattgtcagaaatacgtaacaattccaaaattaaaaagactaggataagtattttccatttagaaagtcattacttactcgttgatgacttaagaatgaatagcatatctagtctttctaactattttataaagtttttttgaaattttctaagtaatccaaagctctattagcttgtgcttcatagcgttcttttttatctttaattctagtttctaaagatggtaataacccgaagttagcattcataggttggaaattcttattgtttttagcatgagaaatatagtaagccatacttccaatcattgtttctctcggaaatactacctcacccttgcctaatattttatgcgcaagattgatacctgcaactaagccgctagctgcgctttctacataaccttcaacaccagtcatttgtcccgcaaactgtatgtttggttgtgaaatcaattcatatttctcgtttaatacgtccggtgaattaatgaaggtatttctatgcatcacaccatatctaacaatatcaacattttctaagcctggaattaatttaatgacttctttttgagctccccattttaaatgcgtttggaagccaacaatattgtagagtgtaccagcagcgtcatcttgtcttaattgaaccaccgcataaggacgtttcccagtctttggatcttctaatcctactggtttcattggtccaaatagtaatgtcttgcgtccgcgttctgccattacttcaaaaggcatacaaccctcgaaatatttttctttttcaaatgaatttacaggcgcaacttcagcttctaatactgcatcataaaagcgattaaattcatcctcagtcataggacagtttaaatatgcagcttcacctttatcataacgggactttaagtaaactttatccatatcaatagattctttttcaataattggagcagccgcatcatagaaataaagttgatctttaccagtaatgtccactatttcttgcgcaagggtttctgtagtaagtggtcctgttgcgataattgtgtatccatctggaatggcattaatttcttcattaataactgtgatattttcatgatttttaagtgtttcagtaatataacctgaaaaatcgtgtctatcaactgctaatgcaccaccagctggaactcgtgccttatcagccgcttcaataattatagaattcaatcttctcatttcttcttttaaaacacccacaccattagttaaagcatttccgcgtaatgaattggaacatacaagttccgcaaatttatcagtatggtgcgctggtgtttgtttaacaggtctcatctctattagattaactttaattcctctttcagctaattgatatgccgcttctgaaccggcaagaccagcacctattacatttacagtttgagtcatttctatactccttttattgtcatttatgtcttttaattatgttgttatgtttatattatccgcacttatttagattaatcctttactatctttaaaataagattcactaatgattctatttaacaatcttaaaatgtatctaggaaataaaaatattatttctgcgctgcctctttataatcgcaatttgaacatattacttgtgttgtcttgccttttttattttcaacaagatattggttacattttggacaatctcttccaatcggcttatcccaagagataaagtcgcattcaggatatttcgaacatccataaaagacacgattctttttagattttctttctacgacgtcaccatcattacattttggacatttaacaccaatagacttaactatcgcttttgtattacgacaatccgggaagtttgagcaagccatgaacttaccatagcgtcccatttttataaccataggagaaccacaaatttcacagtcttcaccggctggctcatctttgatttcaatcttttccatctcttcttcagcacgttcaacatcttgtttaaagctactaaagaaaccgtcgattactttcctccatgtaatgtcgccttctgcaatcttatcaagtaacgtttccatattcactgtgaattccacatcaataatctctgggaagtattctttcacttgttcatgaactatttctcccaactcagtaggaacaaaacgcttactttctaatttgacatagttacgcttttgaatcgtatctattgtcggtgcataagttgatggtcgcccaattttcaattcttctagtgtttttactaatctcgcctcagtatatcttggaggtggttgtgtatagtgttgagctggttcaatttgagttgctgtgactttatcaccttgctctaatttaggcagtttattttccttttcgctatcactatcatctttagtttctacataaagtgtcataaatcctttaaacttgattgtttgaccattcgctctaaatttaatgtcaccttgtgttatgtctaatgagactgtatcaagtattgctggagccatttgactagcaacaaatcgttcccaaattaatttgtataatcggtattggtctttcgtcaaaaatgacttcatatcatctggcgtacgcatagtacttgaaggtctaatagcctcatgggcatcttggtcaccttgtttccctgatgctttacgtttagaagtgtaagattcaccgtatttatcagttatatactgttttgcttcaactttggcagtatctgaaatacgtgtagaatcggttctcatatatgttattaaaccaatcgtaccttgttttttcaaatctataccttcatataattgttgtgcgaccatcattgtttttcttgctttaaagtttaatttacgtgccgcctcttgttgtaatgtagaagttgtaaatgggtttgctggattacgcgttttttcttttttagtcacgtttgtaatttcgaattgatctccatctaatgcagctgtaattttctcaacatcttttttcgtttttagtttaaaaggtttatttttataatgaaggaatttagcattgaattttgattttttgtatctaaattctccttcaatagtccaatattcttctggtttaaagtttcgaatttcattttcacggtcaatgactaaacgaagtgcaacagattgaactcgacccgctgacaaccctttttttacttttttccaaagaactggcgagatgttatagccaactaatctatctaatattcgacgcgcttgttgtgcatcgactaagttcatttcaatttctctaggatttttaaaactttctttaacagcgtctttagttatttcgttgaaaacaacgcgattttctttagaatcttcaagctctaaaatttttgataaatgccaagcaattgcttcaccttcacggtcggggtcacttgcgagaaagacgtttttcgctttttttgcatgttttttcaattcttttacaacaggaccttttccgcgtattgttatatattttggttcgtaattatcttcagtgtcgacacccatttgacttcttggtaagtctctgacgtgtcccattgaagctataactttatatttcttacctaaatacttttcaatggtttttgcttttgcaggcgattcaacaatgactaaattatctgccaatgtcatttccccctcgctaatctaattactaaagataaatgataaacgcttaattttgcttttgtcaacgttttatatctaaacaaatcattttccctgtctattttttatagattttattaaaaaataaattacaaagggaaacaaaagaaatatgaagcaactcgttatttttagttttaaatatagtagtcttcaaatatatcattagcgtttaatactaccttagcaccttcttggatacgtaataaattaccttttgtcataggattaaacatagatccaggtaaaacataaacatttctattttgctctaatgcaaaatctatcgtgatgtgactgccactttgttccttagcctcagtaattaaaaccccttttgacaaaccgctgataattctattgcgctcaggaaatctatatttagcgattggtgtatgtggtggatattcagatataactaaaccttcttcttctattttatttcttaatgctaatgtacttttgggataatgtgtttgatggccaaaggctaaaactgcaattgtagggagattgtattttaaagctatttgatgtgccattgcatcagctccttgagcaaggccggaaacaattgttaaatatttgcttttatcatttgataataaaaattctaaagactgttgggtataacttgtagaatctcttgcacctactactgccaaatgatgcatattatttattaatttgatgttccctttatagaaaagaagtaatggaaattgatatatttcttttaatagcactgggtattcagaatccatatatgtaatgtaacttacttttaatttctgcagttctttaataatatcgttatgatcaagttttataaaagcatagtatttacgtaataaatgaacattttcttccctattcacccattcacataaataactatctttttttcttccctcctctttaattacattaggatatgccattaaaaattgatgaatttgtttagtcgaaaagtgtgcccagtataacttaagcaaaaatagtttaatcaataaatcaactcctttttgtaatcatacaaaatcatattctatttttgttttacatttctaatacaaaaacattgtcgatgtaatgttattttaaggagtaaaaatactgacttaaaaagtgaaaagtatgttggaaagaatttaaaatttcaatttccaacatactttataattaaaccttataaataagttttgcaaatttatatagaattggtcttactggtttgatgaaatcaccaattaattcttcaacatgtgcattaaaaccctttttaaattgttgaacaccaaaatcatccgcctcattactaaagacgcctgttattccataaaaattatacctattaatattatgtgattttgcatattttatcatatgccattgtagatgatatgcacccatatactgattatatttcggatttgatccacttgatagataataaacttcatcatcagtacatataaataaagcagcagctaaatccaaaacaggtccatcttcaaatattagttcttcggttttactaattctattattaatactagataattgcatatttaactgatttaattttgatttattttttttagaatttggattttcatttaatgctctgttcacagtcatcatttcattttcgattttcaataattgtatttttaatttatcttgatattcattaagatttatacaagctatctttaacattgccttatctttatatatttcttgcattcgtttaaaataatcttcattcatgaaatgaaaaccatgtttttcttcagccatttgaaacaatttataaaatcgatttgtttcttcaatagataaatcttcaaccttaacaccaatctcaatagtcttttttatatttcttctagtttggtattccatttcttttaaaagttgattctcatctttatcttttaaatccaatacagaaatccacctaatttgacttttatttgaatatcctgttgtataaccttgatggagatacccaattttccctagcatctttactatcactgaattattataattctttattatcctaccatttgcatctcttaaattctctattaaatatggatcaacaagaataaatactcctctatttttataaatgaatttagataattctttaaaaaagtaacaaactaatttagcatcgaaataatcaagtaaaggacctctatgagagtagaaatatttgtagaatttaaaaattcgtgcctctgttaataaacatgcagctataacttcatttttatcattcttcactcccacaatatgtgcttcatgatttattttatttctataattatataattctatagactgtgtataatgtttgaagtgctttttggtgtagttggtaaattcttcttcacttaaagttgaaaatttcatatttcaatgtcctgccttcgatttaaattatgcttttttaaatggtctaataaaaatcatatcattttcataattatgaacaactttatgtgcaacctctgctttacgccatccaccattattccagttttgatctaaactttggaacttcattatttttccatcataatcaccatttaagacaatagctgtatgaccatatcctccaccaaatcttccactaaaaaccactaagtccccaggttcagctttgaaagttggtgtgttgtgataaattttagcttcactattaaaattatttgcatatggtatatctttagctccatatccttttaatccatgaccataaagatgattccaatatacattaactaaatcgaaacattgccatccataactaccgtcgaaatcccatcctctattctctaatgttttcaaataatttaatgtactgctattactattacttttattatttgaagacactgtttttggttttggttctactaatggtgtcattggcacttttaatttttgaccaataaatattaaattaggatttgctatattatttgtattttgaatatttgaaactgtagttttgtattttaatgctatagcactaagtgtgtctcctttttttacagtatagatttgtgtttttggagcttctctaaaactgtagtaaccaaagtaattattagtaactttattcgttttcttctgattagaattttgagcttccaagtttgcaattttaatttctttagtaagttcattgttattaataactagattgttaccttggcttgagtttttcggagtatttgaaatctttatatcttgattaatttcatttccgtttgaaattgctgatttgttgtctaactttaaacttgtgtccgatgttttaacagcaccttcattttttattttgtcttttgtcgtatttttattagcatttaactctgatttcgcgaatacattttgctcataccctcttgtaaaatctttagatttatcaatttcatctgcatatgctttgttcgacatacccaatgccaaaaacatacctattgaaattgacaaaattccaatactaacttttctaattgaatagcgtactttactttgttgtttattcatgatgaaacactccttacaataatatacaaacattataacatagtgcgctatatattttaattaaaattttctttgttttataaagctattgtaggaggtaaaataattaacttgtctttccaaaatatgaaaagtgtactaaaattcatcgcacgacaaatagcccatttccgatacttttataaagtatggaatgggctatagccatttatatcatcttttaactttatttattaacagttaataatgattcataaatacctgcttctttagcagcttcaattaatgttgaaccaatttctgaaggtgttgccgctgttttcacaccacaactatttaatgttttaattttctcttcagcagtacctttaccacctgaaatgattgcaccagcatgtcccatacgttttccaggaggtgctgtttgtccaccgataaagcctacaactggttttgtcatattcgctttaatccattcagctgcttcttcttcagccgtaccaccgatttcaccaatcataacaactgctttcgtttcgtcatcttcattgaatgcttttaaaacatcaataaagtttgttccgttgactgggtctccaccaataccaacagctgtagtttgaccaataccttcttcagtcaattggtgcactgcttcatatgttaatgtacctgaacgagatactacaccaacatgacctttttcgtgaatatagccaggcataataccaattttacattcatctgctgtaatcacacctggacagttcggaccaactaaacgtgtttttctaccttgtaagtagcgtttaactttaaccatgtctaatacaggaatatgttcagtgatacaaataaccatatctaagtctgcatcagctgcttctaaaattgagtctgcagcaaatggtgctggaacgtaaatgactgaaaccgttgccccagtttcatttttagcttcttcaacagtgttgaaaacaggaacgccttcaacaacttgaccacctttaccaggcgtcacacctgctactattttcgtaccataatcaagcatttgttttgtatggaaaagggcagtagaccctgtaataccttgtaccattactttagtattcttatctataaatacactcatcttagtgctcccatcctttccttatgcttctttgactagtttaacaattttttgtgcaccttcagccattgttgctgctggttcaattgctaatcctgagtcttttaagatttttttacctaactcaacatttgtaccttctaggcgtacaactagtggtaaagttaaatctacttcttttacagcttcaacgataccttctgcgataacatcacatttcataatgccaccgaaaatgtttacaaaaatacctttaacattttcatcacctaaaatgattttaaatgcttcagttactttttctctagtagcgcttccgcctgcatctaagaaattggctgggtttccaccgaaatgattaatcgtatccattgttgccatggctaaacctgcaccattaaccatacatccgatgtcaccatctaatgcaatgtatgataaatcatgtttagacgcttcaatctctttcggatcttcttcttctaaatcacgtaattctacaacatctttatgtctgaataatgcattatcatcaaaattaattttagcatctaatgccaatacatcaccatcagctgttgtaactaatgggttgatttctacgattgaacaatctttttcaatgaatacattataaagtgctaataagaatttagcagctttgttaacagattctttaggaatattaatattaaacgcaattcgtcttgcttggaatggtgaaagtccgattactggatcgatagtttctttgaagatcttttcaggagtcttcgcagcaacttcttcaatctcagtgcccccttcttcagacgccatcaatgttacttggtcagtcgcacgatcaataacgaatccaacgtaatattctttttgaatagcacaaccttcttcgatatataaacgcttaatttctttaccttctggaccagtttgatgtgtcaccaaagttttccctaataattcttttgcatatgtttctacctcagataaagatttagcaatttttactccgcctgctttacctctacctccagcatgaatttgtgcttttacaacataaacatcagaatttaattcttttgctttctccaccgcttcttcagcagtaaatgctactcgtccttctggaactgcaacgcccattgaacgaaatatttctttaccttgatactcgtggatattcatcttccatcctcctgttacttaggttaagttcccttacaattataaaaaatgtaagcgctattgtaaacttaaatgctacttttttatcatttaattgaattttacgatttacagtaacgattttataggttcaaagctttttctatgctctttcataatgccaatatcatcgattgctagtaaatgttgtttggtaccgtaacccgcgtttttttcaaaaccatattcaggataatctttagataactgtgtcatataatcatcacgaaaaacctttgccatgatacttgcagctgcaatggacacacttcttgcatcacccttgattaaagatacttgaggcagtgcattatcaagcgtcatcgcgtctatcaataaatgcgttggttgtactgataatccatcaatagctcgctgcatggcgatttgagtagctttataaatattaaattcatctatttcttcagctgtcgcgatcccatatgcaaaagcagtaacttcattttttagtgcttcatttaattctagacgtttcgtaacaggtacttttttcgagtcatcaaggcccaaataattgtgatttgaatttaaaattgttgcgcatgcaacgactggacctgctaaaggtcctcttccaacttcatcaatcccacaaataatagcattaggatgctcttttaatatttcattttcaaagtaagtcatttcaacatacttttcttttaaagcttgttctttttctaacgcttttctgcgcctagctatggcattttgaacaccttttcgctcatctaaaaagcattcatgattttctaattcttctattgtattaaccgcattaatcaactgcgtaacttctttaattgttagcgtcatttgctaattcctcagtcatatctttaaaaatatcaaaacaataatttcctattttagcatttcgaatatcataaataatcagttcaatgactgcttcgtaatcaatttcattaccacgtcgaattaagccacgttttttccctatcgcatcaaaccacgctattatttctgcatcttcaggaacttcaatattataatgtgactttaatcgcgctaaatcattttgaattaaaaagtttaatccatagatggcaacttcatctaagtgcacaatactatcttttatcgcaccagttaaactcaacttcttaccgacttcttcatcttcaaatttaggccaaagtatccctggtgtgtctaatagttgtaatgcattaccaactttaatccattgttgttgtttggtcacacctggtttattaccagtctgcgcaatactacgctttgccagtttatttattaatgtggatttaccaacatttggaattccaacgatcattgctcttatcgctctaggtttaagtcctttcgctttttcgcgttcaaatttttcagcagtcgccttaattgctgcagcttccactttctttaaatttttaccgtgcttagcatccactgatacaggatagtatcctttatcaataaaaaattgttcccattttgacatctcatttaaattagacatatcttttttatttaatataacaacacgtggtttttggttaataacttcatctatcatagggtttcttgaactatatggaattcttgcatctactagttcaaacactacatctactttttttaattgttcacttacttctcttttggctttcgccatatgtcctggataccattgaataaccattcaattcaccttactttcgtcaattcttttctcattattaaaatctataacctgttaattatagaacaaattcattaattcaactatatttattttaacattgtcacacttcttaacaatgctttagatttaggtataagtgattatttcaagttttctacaattaaaaatcatcatttgttaaatctaagttacttattaagtgacattcatctttatcagtatgacatttttattattcaatatatttgtttaatgataaactgaaaatgatccaaagtttaagtaactatgataaggtatctgttccacagtcatcttcgtctttacctatcaagaacctcattaactttagtttcagttaaacttaattttaaatttgaaagttgaggataatgttgtgttaaaaaagtggctaaattcaaacgtcaaacaattctttgttataactttcattagtgtaatattaacgcttattttattttctactcatatctatgattatattgtgaatggtactgtttttagcggggctggagatggattccgtcaaatgatgccatttcaaatgtatttgtatgaacatctacgtagtttttctagtttatatgatgcatcgtttggattaggtggcgattatatgaaaggactatcatattattattcgctgtcacctttaatgtggctaaattttctattcattaaaataggagaaacggttggtatatttaatccgacgacaatacatttttggccgacaaaccaacttattatggctatgatacgagctatcataacatttgtcgtgaccttctacttatttaaaatattacactttaaacgctcagcaaatatgatcgctacgattttatacggcatgtcaactgtcgttatatactttaattttacttggtcattttatggaaatttattatatttattgccattatcgattcttggtttggaaagatattttcaacaacgcaaaatcggtattttcattgttgcgatagccttaacactatttagcaatttttatttcagttattatcaagctattattataggttgctactatttatatcgactcattttcacttacaaatatgacattgtctctagaacacaaaaattaatttgcgtcatatctgctacagttttgagtgtgttatcaagtgtatttggtttattcactggcatttctgcgtttttggaaaatgacagaaagcaaaatcccaatgttgatataccgtttttgacaccacttgattatcattattttttctttagcgatggattttatattacgatttcaattcttactatcgttgcattattgtcattcaaactgtatcgtttttacttttatagacttttcgcaatagtaacatggatattatttataggttcattatcacagtatttcgacagtgcttttaatggtttttcatttccagaaaggcgttgggtgtatatcttagcactatcatcaagtgctctttgcggattgtttattcaacatttatcaacattaaatatgaaatattatttaataagaacaatacccgtatgcatcatcgcaatactttatgtattactatcaccgacacacccacttgcacttatagtaggtattatcctgctaatagtgcttgccgttattttaaaatttagtttatggcgttataaaaaattaaccgttgcaatattagtattaatcgttatgattcaacaaatcgtcattttagataacaacaaaaacatggcaatcaaaccttatcaacaatcattatcaacgttgaaacaacatgattaccatagtaactatgtaaaccagcttataaaaaagataaatcaaaatgcaacaggctcatttaatcgcattgattatatgtcagactatgcattaaattcaccatttatatatcattataatggcatttcattatattctagtatttttaatggagacattttaaaatattatgacaagacactccaaattaatatgccaatcgataaaaacagcacttatagattacttggcaatcgtcaaaatttactatcactttggaatgttaatgatcgaattagagtgaatcatgatgacaacttaccatatggatttaaaattaagtctgaacacaaagacaataaagttcgttggattcattctaaaaataccatccattatccaagtgcacatattacaaataaggtcttttccaataaagaattaaaatctccattagataaagaacaagcaatgttgcaagggattgtttctaacaatattaaagatgttaatacacattttaaagccaataaaaatttactatcagattcaacaattaaattaaatagtgcagcctggcaatctcctacaaaacatttattacaagttaaacaaaataatggtggtctaactgtacagttgccaaaatcagtttctaatcaatttaaagatttgtattttgaaatggatttagaattactttcgccggataaagctcatgatgttaaagtgaatgaatatacacaagaaagaaataaactcacttataaatatcgacgcgttgtaacacccgtaacgatacgcattaaagctccagatagaattagattatcattgcctaaaggtaagtatcgagtaaatttaaaagggatatacggcgaagattataccacgcttaaagacgcttcaaattcattagaagctgtcaaagttagtaagacaaagcatggttatactattactaaaaataaaaattcatctgggtatattgttttgccaacagcatataatcaaggtatgaaagcgacatcaggtgatcaaagtcttaaagttgaacaagtaaatggtgttatgaccggcattaaagcacctaaaaatataacaaagattcaattgagctataccccaccatactattatttacttataacaattactatatttggcattatatgtagtattattttcacgagatgggcaagacaaaaataatgttgctacgcatatatttaataaatctactaagtccttttcaatggcacttagtagatttttgtttatataaccattttgagcaaacacgttatgaatagagaaggaataaacaattacattatcaactttacattaactaaacagcaaaaaaagccatctatatcactccataaaagtgacctagatggctttattgtttgagtcgaatttgactcatacatagctttgtttaaatgctgattaacgaatttcttggattctagcagctttaccacgtaaactacgtaagtaatataatttagcacgacgtactttaccacgacgtttaacttcgattttttcaatttttggtgtgtgtaatgggaatgtacgttccacgccaacacctgatgaaattttacgaactgtaaacgtttcagaaacgccaccgccacgacgtttaattacaacgccttcgaatacttggatacgctcacgagtaccctcaatgatacgtacgtgtacacgtaaagtatcaccaggacggaaacttggtaagtctgtacgtaattgtgatttagttactgcttcgattaatttgtgatttgtcattataaattctcctcttcaacctatgttcttgcctcgacaaatatatagcagcggatcatagtgattttagtgtttccacactcagattatgttagcacaatactaaccttttttcaatcctattttatatctttctaatatttgcttatctgcattagttaatggatatttttcaattaagtcaggtcttttattatatgtgcggatcaacttttgctcatgtctccatgcatcaatattggcatgatttccagacaataaaacatctggaactgttagacccttaaattcacgcggacgtgtatattgcggaaactctaataacccatctgaaaatgaatcgtcttgatgtgactgttcattacctaaaacacctggaatcagtctaacaatagcatcagtcatggtcatcgctggcaattctccaccagttaaaacatagtcacccattgatatttcatctgtgacaagatgtgttcggatacgttcatcgtaaccttcataatgtccgcatatgaaaacgatgtggtcggccttgcttaattcaacagctttctgatgtgaaaatggctcgccttgtggacacattaaaataacgcgtgtttgttctgtgacatctaagtcttccatcgcattaaaaacaggttcaggctttaacaccataccttgtccgccaccatacggataatcatctacttggttgtgcttgttaattgcataatctctaaaattaaccgtattgatttgtaatttattgttttcttgggcacgtttcataattgaatgatttaaaacaccatcaaacatttcaggaaataaagttaaataatcaattttcattaatccaacaatccttccattggcgtgatgataatttttttattttcaacatccacttcttttacaacatcagcaatataaggaatcaaatattctttagatcctttaatcacccacacatcattcgcacctgtttcaaatatattaattacacgacctattggtgtttcttgatcatcaaaaactgtacatcctataatatctgaataataaaattcattttcctcaagtacgatatcttcatgatcacgctcttgataaatagaactcccttttaaatgctcaatatcattaatattattaataccttcaaatgtaagcatatgaagccctttatgcactctatgtgacttaacagtatattcaaggtcgttattgttatgcacaactgtcagcacttgaccgggttgaaaacgaacgtctgtaaagtctgaattggattttactttaatttcacctttaataccatgtgtgttaacaatttgaccaacttcaactctcattctattacctccaactctatgctttgaacacttctattttaattgaaaataattcaaagaaaaagggcaccattatggtacccaatacgttctatattactaacatgtgatattcccaacgtatcattgagtaataactgtcagtgtaaacgagttattcttattgttagaacaattttacgctaaattacttagctttcttttgttcgtcaaattttttcataataccttcttttgataagatattgtgaactgtatcagttggtttcgcaccatcatttaaccattttaaagctaacgcttcgtcaactttaatttctggagcattagcgctcgttgggttataagtaccgatttgttcgatgatacgtccgtcacgtggagaacgagcatctgctactacgatacgatagaatggatttctttttgaacctaaacgtgttaaacgaattttaactgccatttataaaatctcctttaagtcatgttttaatttttattttctacaagaaataatattaacaggtgtatgaatgtttgtaaagagttttttctttaccaggaaaattattgaacctttttcttacaataataactatgtgattactaaattagactgttaataggttataaaaattcatagtaaatttcaccacctacgtgttaagttaatttatctcgtaaggacatgaatggtaccacttctaccgcacacgttcccccaatataacttattaatattagcaacaataacctcatgttctagcaaatcagcaatttcagtttttaattattattgtgtatctaaaaatatgcaccccataaagttatattctttagtataactttcgggatgcacatctcattgcaacaaaaatcagcgtgttatattaaacattaaaacggtaaattcataccttttaacatattttgcatttgattgcgtttaccttttttacctttaccgccaccagtgaactgtttcatcattttcttcatatcgttaaattgtttcatcaaacgattgacttcttgtaatgaacgaccagaccctttagcaatacgctttttacgtgatacattcaatgtgtctggattgtttctttcagccggcgtcattgactggataatcgctttaatatgatcaatttgcttttcactcatattaagcttatctagccctttcattttattcatacctggaatcattttcataatatcatccagtggtcctagatttttcacctgatcaagttgttctaaaaaatcatctaaagtaaacgatgactcacgcatctttttctctaaatcttttgctttttcttgatccacatcttgttgcgctttttcaattaaacttaacacatcacccatacctaaaatacgtgatgccatacgttcaggatggaatagctctaaaccatctaacttttcactcataccaacaaatttaattggtttttgtgtcaccgaacgaatagataaagctgcaccaccacgtgtatcaccatctaatttagttaaggtaacacctgtgacatcaagttgatcgtcaaaagattctgcaacattgacagcatcttgacccgtcattgaatcgacaactaacataatttcgtttggtttagcaatgtcttttacttcttttaattcgttcatcaatgcttcatcgatgtgtaatcgacctgctgtatcaatgattacaaagtctaaatgttcttctttagcatgttttaatgcattagttacaatttgttgtggctttacttgatctccttcactgtatacaggaatatcaatttgtttccctactgtttgtaattgatttatcgctgctggacgataaatatctgctgcaactaacataggttttttgttgtattttttacgcatcaataatgctaatttacctgcagttgttgttttaccagcaccttgtaaaccaaccatcataacaacagtaggtggtttatttgacatattaatcgacgtattttctccacccatcaactgcgttaattcatcttgaactattttaataacttgttgccctggtgttaatgattgcattacatcggaacctaatgcgcgttctgatactgttttaataaattcttttaccactttaaagtttacgtcagcctcaagtaacgctaatcttacttcacgcatcattatctttatatcagcttcagtaagtttacccttaccacgcattttttgcatcgtcgcttgcaagcgttctgataacccttcaaatgccatatcgatgtcctccctcaatttatatctattctaagtcttctaattgttgaatataacgttgtatttgttctggattacttaaatgttgtttcatttcatcatatatttctcggcgttgctcaaatttctggtataattccaatttcttttcataatcttcaactaaatcgccagttcttcttatattatcataaactgcttgtctactcacattaaaagtatctgcgatttcacttaaagaataatcttcaagataaaataattccaaataattacgttgtttattcgtcaataaggattgataaaaatcaaacaaataattcattcgtaacgttttaactaaatcattttgacccatgattatcgtccttttcttctgttacaatttgatcattttcaactgttgttatttcttcattttgttcaatcatatcagcgaataagccgtagacataactttcagggttaaatggttgtaagtcatctaattgctcacctaaacctacatatttaactgggatgtgcaattcattacgaatggctaatacgataccacctttggctgtaccatctaatttcgttaatacaatacctgtaacatttgttacttctttaaagtttctagcttgtgacaacgcattctgaccagttgtagcatctaaacatagtaatgcttcatgaggcgcatctggcactgctcgattaattacacgcttaactttttctaattcttgcattagatttgttttattttgtaaacgtccagcggtatcacagattaaaatatcaacacctttgtttttagcggcattaatcgcatcatacataacagcagctggatcagaaccttcactttggctaattacgtctacaccaacacgttcgccccaaactttcaattgatcaatagcacccgctctaaaagtatcgcccgcagctaacattacttttttaccttccattttatatcggtaagctaattttccaattgttgttgttttaccaacaccattcacaccaaccattaaaatgacatttaaacgaccatcttctaagttcatagcttctgaattatcatcttcttgatggtaaatctctacgattttttcaacaatgacttcacgcaaatcttcagtatcttgaatattacgtcgttgtgcttccatacgtaattcttcagttaacgtcatcactgtattaaaaccgacgtctgcagtgattaacatttcttctaaagcttcaaaaaagtcttcatctactttacgatatctcgctatcaaattatttaattgttcttggaaattttgacgagatttttcgagtcctgctttaaatttagcacccattttttgagcttcaatttcttcaaaatcttcaattgatattaagccatcgtcatcaaaatccgcttcactcaacttgcgtggcttctttttcacttcagcattttctgctaaatcatttgcgtcctgcgttgaaccttcagaatgtgtatcttctaatttgtcttgaccttgttcttctgttaaggatttaacttcttcattttctttatttgttgcaaacttatcttttaagcgtttaaaaaagctcattattgctcctccttcaacacatcatctattgtatttaaattcacactcacaagtttagtaacacctgattcttgcattgttacaccgtataacctatctgcaaattccattgttcctttacggtgtgtaataacaatgaattgtgtttcgtctgataactcatttaaatattttgcgtatctaataacatttgcttcatctagtgcagcttcaacctcatctaatataacaaaaggtgcagatcttacttttaaaattgcaaatagtaaagcaatagcagttaatgcacgctcaccaccactcagtaacgataaatgttgcaactttttacccggtggttgtaccacaatatcaataccagctgttaaataatcggcttcagttaattgcaattctgcatcgcctccaccaaacaattgtttgaacacagctgtaaaatgtccttgaatagcatggaaagtttctttaaatctttcagtaacctcttgatccatttcacttataatttgctctaatgtttctttagctttacgaagatctgtacgttgttcacttaaaaatgtataacgttcatttaactcttcaaattgttcaattgcatttaagtttacaggacctagttcatcaatcgacatcttcattaacttaacttttttacgtaatgcgtcaatcgattcatcactcgtatattcagatttcgcacgttcaacagtcaattgatattcatcatttaaatgatctatcgcatgatgaattaatacatctagctttgattgttcagctttaatatcttggtagtgattttcgatagctaaaatatcttggtgacaaacttgtagtttagcttcttgcgcatcgatttgttcattcaactcaatacgttgttgtttcaatttatctaattcatctgataagcgtgttctcgtttcttgttgaccattaatttgatctttaatattttgaaaagcttgttcgcccatcacttcatccgaattaaagaatgcaattttttctttaacatcttttaattgatgtttagtttgttgattttgattatttaatcgatctattgtctgttgttgtgttttaatacgctctttaaccacagcaagatcagattgtttctgatgtaaggtttgttgtgttttagtaacgctttccttaccttctttagaaagttttgtgtagcgttcaatttcatcttctagtcgttttaaagatgctttaatactttctagataagtttctttttcactcaaagtttgtcgacttttgtcactcgtataaccatcatttttttcaaattcgaattcttcatgatcattttttatttgtgtttcttgtgtagttaatctatcgagctccatttcaaaatgatgcacttgctctttaagtgtattatgcttttgacttttttcaaaatacagttcacttaattgatcactttttatcttcaactctttaaattgttgttcaaatgattctgtttgacgcaagtaatcttctaattggtgtctcattgttgtcaactcgtctttttgagacagaatactttttgacttacgagcgccaccaccagtcatagaaccaccaggatttacaatatcaccttccaaagtaacaatacgagttcgatatttaatcgcacgtgccaattcatttgcatgctttaaatgatcaacgataatcgtattacctaataaattcccgataatattttgatattctggtgctactttaactgcttccgaagcgatactaataaatccgtttgcctctttagcaatagatttaatatcagtcgctaccactctactctgtataacatttaatggtaaaaacgtcgcacgacctaaattacgttcttttaaaaattgaatagcctggcgtccatctttttctgaatctacaatgacatgttgtaatgaagcacctaatgctgtttcaattgcctgagttaatttagatggcacatcaataatttccgcaactgcaccataaataccctttaattctttatttttagctttcaaaatatgtttgacgccattgaaaaaataagtatattcttcctcttgcgttgccaaactatcaatacgtgttttcattttttcggtatatcgatatgcttgatacaatttctcttcgtattcattttgtgctttttttgtatcagtgaggtctttttctatatttttaatttctttatctacagcagaaagttctttgttggtctgttgatattctttttttgtcgtttttatttgaccctgaatatctttcaattgctcaaaaacttcaactaatcgagaatctagtcttgattttttagcctcattctcttctatagtatgctttaaaaaacgaatatcattgttaacatctgattgctctgacattaatgtatagtattcgtttttaatttcttccaatttttcatcatgtgcttcgtctgaaacatatagttgttcttcaagttcacgaatgacagcattgagttctttttgtttacttttcagagacttataagtatcttgagcttcagaaatctcatttgatatattttctaaaagctccattaaattttcttgttcttcttcatatcgtgcatttgtttcagattgatttttcttacgttcttccaaaacatttaattgtcccgtatatttttcaaaggcttccgtagcttttactaattgataattaagcgattcaacatcattatcaagttgatgacgtttacctttatattgttgaatttgttggcttaaacgttgcttgtcagcttctttatttgcttgttggccttgtaaatcatttaaacgttgatctaattgtctattgtcatttgtatattgatcaatatcgtgcactgtaactacaatgtcactatgtttcatttgatgtgaaagtgtcttatattctttagctatagctgcctcctcttttagaggttctacgcgaccttccaaatcatataaaatgtcttctactctcgttaaattatcttctgtttggtcaagtttatttaatgattcagccttacgttttttatatttaagtacaccagccgattcttcaataatttgacgtctatcaattggtttagcatttagtatttcatcaactctaccttgcgagataatgctatacgcttcttttcccaatccagaatctaaaaataaatcggcaatatcttttaatcttgcacggtcattatttatgtagtactcactttcaccacttcgatacaatcttcttgttacaataacttcgttttcatcaacactgagctttttagaatgattatctaatcttaactgtacttcagcataattttgagctttgcgatgttctgcacctgagaagataatatcttccatttttgagccacgtaatgatttagccgattgttcacccaacacccatttaatagcatctgtaatattacttttaccgcttccatttggaccaacaattgcagttacacctttatcgaattgaacattggtttgatctgcaaaagacttaaatccaatggcatctattgattttaaataaaccatcctaaactccttatcacaattttaaagaacacatgtatacgatattttagtatttgtatattaaatttcgaagttgttccataaaatattaaaaattcttccttaaatcctaaatcgaacacctatatgtcgtatcatataaatttctatttaatttgttttaattgcttataggcactttcagcagcacgttgttctgattcttttttcgttttccctttaccttcagctattgcttccccttgcagaataacttctgaagtgaatagacgatgatgtgccggtccctcttcttttattaaattataggttacatcacctttattttgctggtgcacatattcttggaattgtgttttaaaatctaccacgcctaataactcattttgttctacatgtgggaaaatgactttctcagcaaatttccaaactatatctagtccttgatccaaatacaatgccccaataaatgcttcgaatgcatctgatattaatgatggtcttgtacgtccccctgttttctcttcacctttaccaagtaaaatcatttcgttcaatccaattttattcgcaaatattacaagtgagggctcacatacaatagtggcacgcatttttgttaaattcccttctggcaagttgggatgtttatcaaataaatatcgtgaaaccgtcaattctaataccgcatcacccaaaaactctaaacgctcattatggtctaaacgattcatattaaaatcattaataaaactcgaatgcgaaaatgcttgttggtataaatcaatattttgataagtaaagcctaactctgtcattttagtatcaaagcgctttctaaaacgattaactatctcacttttcttttgtttagacattattttatctcctttatgtgttgctcttgaatcatctttaattttacgttaaaactattgataattaaagaaaaaaactgagtcgacaatactgacgacccagatgtaagatttattatttttcaagactgttaataaatttaacagcatcaccaacagtgttgattttttcagcttcttcatcaggaatttcagtaccaaactcgtcttctaattccattactaattcagcgatatcaagtgagtcagcgcctaaatcatctttgaaagatgcatcttcagttactttatcagcgtctacacctaaacggtcaacgatgatatcttttactttatcgaaattttccacgtcgattcacctcctttaaaaatgcctatacatagactactatattttcccattttaaattctaaaaaacaagtagaaattttagaaacacttatcaatttattgattagtgtttcttagggagaaattctggaaccttatctaggttgcttagaatttcccccgcaaagttgactaggtcagacaattctccattggatgaccagtcaaccactgcgtcaatgagctttagctcaaatatattacatgtacattccaccatttacatggattgtttgacctgtaatatattttgctttgtctgatgctaagaacgctactgtattagcaatatctgtgtcttgaccaaaacgtgctaacggaatttgagtcaacatttgttctttaagctcatcacttaaagcatctgtcatatcagaaacaataaaaccaggtgcaactgcatttacagtgataccacgagatgctaattcacgcgccgcagatttagttaaaccaataacacctgcttttgttgcaacatagtttgcttgtcccggattacctactgctccaacaacacttgataaattgatgatagcaccactacgttgtcttaacatttgtggtgttgctttttggatacagttaaatacaccttttaagtttgtgtcaataacatcatcccactcttgttctttcatacgcattaataaattatcgcgagtaatacctgcattatttactaaaacatctaaagaaccaaattggctaactacttctttaatcattgctttaacttcatcagcatcggcaacatttgcttgaatcgcaaaactgtcaacacctttagctttgatttcttcgactactgcttcagctttctctttgctgcctgcatagtttactgctacattatatccttcttctgctaattgtaacgcaatactacgtccaattcctcttgatgcacctgttactaaagcactcttagtcattttcattccatcctttcacatcttctaaagtttgaattgatgttaacttaacatctctatttatttttttaattaagccagataaaacttttccaggaccaatttcaataaaatgatcaacaccttggtctattagccattctgttgagttaatgaattgtactggtgaatataattgcttgaccatattagatttaattacttctttgtcagtttcaccttgcgcatttacattttgaactacaggaaacttagcatcacgccattcaaattgattaatgtaacttgaaaaatcttcttcaatcactttcattagcgatgaatggaatggtccagatactgctaaaggcatgacacgttttgcacctaatgatttacctttttctactagctcatcaattaaagctttgtgacctgaaacaacaatttgacctgggcaattaatgtttgctggttcaattattttgtcatcagatgataatgacttacaaatttcatcgactttatcaaaatctaatcccaatactgcagccatgcttcctacaccagtaggaaatgcttgcgccattaattgaccacgttttctaacaattttaactgcatcttcaaatgataatacgtcagctgcaactaaacttgaatattcacctaaactatgccccatagtaaaatcaggattcaaattttttagcgctgctaataatgccgaactatgcgtcaataaagctggttgtgtgttttcagtttcacccaatttaccttcttcatcagtaaacattgtctctaaaatatcaaagtctaatgtgttcgctgctgaagttaaaatttcagttgcttgatcattgttgttaaacaaatcttgcgccataccaactttttgggcaccttgtcccggaaaaataattgctgttttactcatttgattcacctacagtctctttcattgtttgtacaatattttgttctcctgcgattttcgcttgtctaattgcagaataaaaagctttagcatttgaactaccgtgtgctttaactacagtaccttccaatcctaataatacggaaccaccgtattctgagtaatccatctttttagcgaattcagctaaatctttcttcaatattgcacctgctaatttatttttagtactactcataatcgtatcttttaacattttaccgattgattttgcagtaccttctaaatttttaaggaccatgttcccagtatagccatcggtaactacaacatctgtatcgccatccattaatgtcttcgcttcaatattcccaacaaaattcaatgaatgatcatgatttaataactcatatgattttttcgttaaactattacctttagctggctcggttcctatatttaataatgagattttcggattatcaatacctctaattttttgagcataaatatcccctagttgcgcatactgtaataagtgttcaggtttagcatcagcatttgcaccaacgtctaaaaagacaaaaccttttccatcaatcgttggcaatgttactactaaagccggtctagctacacctttaatacgtccaacaatgaataaaccagctgacattaaagcaccagtattacctgctgacacacatccatctgcttcaccagatttcacagcttcagccatttttaccattgagctatcttttttacgtttaatcgctctaacaggctcatcttccatttcaatcttttcagaacaatgtctaaattcgattcgttcatggttcagattatactttttttcgtcaccgaaaagtataatttctagatctttaaagtcttcaacagccttttgtacggcttctaatacgatatcaggcgcattgtcgccacccatcatatcaattgctaatttaaccataattttatcctcgcttatcataaaacattttaaaatttcctttgaaaactaatgtatgtttaacatatgactttacttcgacgtaataatgttttgcagtttgatttacaactcgtgcttctgctcttaccgtatcatttaattttactttttcaataaattgaatgctactctcatgagttaaaactgttggttgcttaattagcgcaacacataacgaatttgcctgagcaaacagcacatgaccacgcgcaattccagttttatgaaaaacagaatccgatgtaatatctaaaattgattgcgctttaacatttggattgacttgaatcaaatcaccaataaattcttgttcttcaatagaacttatttggtcataattcttttcagcaactaatttaatacgcttccttaattctggtatgtttaaataagtgcgatctaaacgaattgtttgtatactcacttgaaataagtcgcttagttcatggtctgtgatgaagggattgctatcaatttgttgtctgattgcttctctacgtttatctttctttagtttcaacgtctcacccctcattttttagtacctagtcttaaacattcctcacatatcataacactttctatttaaccgactcaacaaataactgtaatatttagctattatttagtcgaaaatttataaattgttaaaataccactttacatttaaatagttcaagtgtcatatcactcaattaacgaagtgttgcactcaaattgacaaatcagcatggcaattagtcaaaactacgatgtaataaattttcttcaacaaaatgacgtaaatgttgatacgtattttcaaagaatacgccagattgaataagttcagctgcttcatcacgagcaacttctaacatacgataatcttcaactaaattggcaactaagaaatctggcaatccactttgtttaacaccaaagaaatctccaggaccacgcatttctaagtctcgttcactcaattcaaatccatccgttgtttgtgtcataattgtcattctttcaattcctgtttctgttttaggggatgcaattaaaacacagtaactttgctggtcacttctacctacacgaccgcgtaactgatgtaaagttgataatccaaagcgatccgcatcataaatcatcataaaagttgcattcggtacattaacacctacttcaacaacagtagtagaaactaaaacatttatctcatgattactaaacttttgcatgacctcatctttttcatcggcagataacttaccatgcaataaccctacacgggaaacaccataatactgttgtaaagactcgtacaatgcgacaacattttgaacatcttcgagatgctcagaactttctattagcgggcaaatgacatatgcttgacgaccttttttcaactctgaggtcatttgcatcaaaactttatcgtattgctcatgctttgcccaagtagtaatgataggtttacgaccttttggtaattgtttaattgaagacacatccatctcaccaaaaactgatattgctagtgttcttggtatcggcgttgctgtcataaataacacattcgtcattgcacctttttctcttaaaagctggcgttgattcacaccaaatcgatgttgttcatctgtaattactaaaccaacattatggaaaatcacatcatcttgaatcaaagcatgggttccaattaaacaatcaatcgtaccattttcaagttgttctaaaagtatctttcgtttcttaccttttactgacccagttaacaatgcaacgttcatagaatctccaaataaagccattaaactttcagcatgttgttctgctaaaatttcagttggtaccatcaatgctgattgataaccagcagtttttaacgcatacatacaaattgcagcaactactgtttttcctgaacctacatcaccttgaagtaatcgatgcatacgtattggtgcttttaaatctctaaaaatttcattaacactggatttctgtgcttcagttagttcaaaaggtaaacgatcaataaatgatttaacttggtctatgtcataatcaatttcaattgcttcgtcagatgacttttctaatctatttagccattgcatacgtaattcgaataaaaacagttcagtaaatgcataggttctacgagcacgtaataaatcctctttacttttaggatgatgtaatgtgttcaaagtaaagtccaaggtctctaatttatatttttctcttagttcatcagttaaccattcatgaattgtcacatcatttaacgcttgtctaatttggtctcgtatttgcttttgtttaataccttccttaatacgatagactggttctaattgaacatctgcgttttcttgagtttgtgtcccttgtgaattaaagaaaaccctattaccagtaatttcctgtttaaccctattccacttacctttaacagttatagtttgatttaattcgattttcttttttaaatacggttgattgaaaaaaatacatttgacagcaatattatttaccattaaatgaacggttaattttgatttatttcttccaaaaaatgcaactactggagctgtatatacttgtccttctatcgtaacgttagattgatcttctgcttgattcaaatcaatcactgtattatcttcatatctagttggcaaataaagaacaagatcttccactgtatgaatatttagttgttgcaatacttctattttcttaggacctataccttttaattgtaaaagagaatatggactttctattaagtttactttagccaaaataaatcacctatgttttatttgattttacgtatcatttagtatgttatttattttatcatgactaagttgaacatgacattgttagcaactcgagaacgatacttttaacccgcaatatcactaaaatagcaaaataaaaaactaccaactgatgatttatcattggtagttttttattttaaatttttattctactgaaaagaaatattgataaattggttgtccaccttcatgaacttccacttctacatctggatattgctcttcgatccagtttatcatgttatctgtaactgcttgctctgcatcttgaccaataatcacagtcaatatttcactatcttctgctaacatctcatttaacaactcagtaaccgttgttaattgatcactttggctgcttacaatcttatcttcaatcaagcccataaacgcgtcttttttaatctcaacgccatcaattttcgtatcacgaacagcgtacgttaatgaaccagatttaacgttatttactgaatcagccatttgcgctttattttcttcaagtgttgcgtccacatcatattggaatagtgcgcttataccttgaggaatagatttcgttggaataacaacagcttctgcatcaacaatactcgctgcttgttcacttgccattaagatatttttattattcggtaaaataattgcacgtttacattttgattgttcaatgactttaacgatatcttctgtagaaggattcatcgtttgtccaccactaatgatatgtgtggcacccattgatttaaatatctctgaaataccttcacccatagaaatagtaataattgctgtttcaaccgtttccattttcggtttagctgtgtgctgttcttttcgaatcacttcacggtgctgttctctcatattttcaaccttaagtttaattaattcaccatattgttgaccataattaaacactttacctgggtattcggtatgcacgtgaactttcacaatttcttcatcattaatgactaataaagaatcaccaaattgactcatatcttgcctgaattcttgttcatcaaaggcttttttattctttccaaaacgaaccatcatttcagtacaatagccataaataatatcttcagtattaattacaccatggaaatcatgttcatcatgtacaaattcatctttatctatctttgcaactttggcttcaacattttcacctttaagcgcttttaagaatccttcgtaaacgcataacaaacctttaccgccactatcaacaacaccaacttctttaagtacagctaataagtttggtgtgttttcaagtgattcattggcttttacaataatgtactccattaattctatacaatcttcagtattatttgctttttctattgcagcttgcgcagcatcttttgcaactgtaagtattgtaccttcaactggtttcataacagctttatatgccgtttcaacaccagcttgaaaactttcagctaacaattttgaattaatttcagattcactttcaatatttttacaaaatcctctgaataattgtgacaagatgacaccagagttacctcttgcacccattagtaaacctttcgagaatgttttacctaattcgccgatatttttcgacaaattattctctacttcttcgcgacctgaagtcatagtaagattcatatttgttcctgtatcaccatctggcactggatacacattcaaagaatctaccaaatctgcattgttagataaattttgtgccccttgtataatcatatcggcaaataatttaccattaattttgctaatcatttcaagttgtcctcctaagctttcttgcctgtattattcacacgtacaccttgtacatatatattgattgaatttactgatacattaagtgatttttccaaagtatatttcactgttgattgtacattattggcaacttcagatattttcacaccgtaacttacaataatgtacatatctatatccactacgccattattttcagttactttgatgcctttagcataattttcatgtcctagtatttccgcaataccatctctaacttgttgtctagatgccatacctacaataccataacattcaacggcctttccacctacaaccgaagcaatcacttcgtttgaaatatcaattttaccgtaatcatttgaaatctctaatgtcatatctttgtccctcctaaatttcaaagtttattattcgttttccctaatcacttttaaaattttaccacttagtgtagtcataaacgctttaagtttcattgattatttttataaaatatcaatggtacaacttatcagaatgacttacgcttaaatcacctattatattttgagtaaactgaatttacactcatgacgattatctataggcgttttcttttaatagatgtagtatcattaaataaaaattttaaatgtttcattcacttatttctctaaaatatcatactacataacttcacagtctacaattatatcacaaaactcagtatttttgacttttatgtgaaaattattcattgtttttcaaatgaaactatgctatcttaattaagtatataagtagttatgtgtatttatatttattaaaggaggtactcatatgggtaaacaatgtttcgtaacaggtcgtaaagcttcgactggtaacagacgttcacacgctttaaactctactaaacgtagatggaacgctaaccttcaaaaagttagaatcctagttgacggtaaacctaaaaaagtttgggtttctgcacgtgctttaaaatctggtaaagtaactagagtttaataaatatattgcacataaaaaatgtgaccttatgtggaggacacatttacttaagaactaagagctcaacctcttagttctttttttgttaccaaacaatacataatggttcatagtgaaattcgaactatcaatataatttggttaatacgtttaataatggttctctgtcaaattggacttatgggttcaatatcgattttggcacataaatcaatgtactaggacctacaattttcctttcaataataaatcacgccataatcttcattaattacagcgtgattcatctattattatgttataaattctatctataaacgtcactttattaaataactcatgcactttattaaaaatcctcacaaatttgaatatacttaatttaaatctgtacttctaatttgcaaaatcaacccatcatgtacagttactttcgcttgcaaagactcaatttcatttgaaatagttaaagtagaacctatattaagcatttgtctagctaaattatatttaaaacctgctagagaaagttctacatcatcagtcatcggtataaatgaaatgtacggataactcttatctttttcaactgtatgttgacctttaggcaataattcaattttattttgttgatcgataacttctatatgaacatcatgtttataatatgcttttttcaataataactgaattgccccaaaaaagtgatctaatcgtccgcctgttgcaccataaattgtaatactatcaaatccaagtgcaacagctttatcaaccgctaaagctaaatccgtatcagctttttcagcttgaactggtttgatttgtaactgttctgttagaagttggcgttcttctttactgactgaatcaaagtctcccactgagaaaaaagggataatttgatgcttcaataaaatcaaagcacctctatcaacgccgccccatttaccttcattacttttggcccaaatatcttgcggcaagtgtcgatcagaacataataaatttatatgcatatacactcaacctttcaatgcttgtgtgacttttttataatcctcttgtttaaagaaaaatgaacctgttactagcattgtagcaccattttcaacacaaactttcgctgtatcggtatttacgcctccatcaacttcaatatcaaagtttaattgacgttccattttaatagcattaagacccgctattttttctacgcattgatcaataaatgattgaccaccaaaccctgggttaactgtcatcactagtacataatcaacaatgtctaaaataggttcaatttgtgatattggtgtaccaggattaattactacaccagcttttttatctaaatgtttaatcatttgaatagcacgatgaatatgaggcgttgattcgacatgaattgaaatcatatcggcaccatgttctgcaaatgatgcaatatacttttctggattttcaatcatcaaatgtacgtctataggtaatgttgtgccttttcttactgcatctaatattggtaaaccaatagatatattaggcacaaattgaccatccataacatcaaaatgaactccgtcgacgcctgcttcttcaagtcgttttaattcatgttgtaaatccaaaaaatcaacagataataatgatggatatagttttgtcatttaatatctaacctttctatttgaaatttcattaaatagttgtaaataatggtcgtatctaaattgcgcaatattccctatctctaattgatgcttaacattacaattaggttctttgatatgattacaattcctaaacttacatgtttcaccatatcgatttaattcaagaaaataatcttttatttcatctttatctatatgatcaaaatctaaagcactgaatccaggtgtgtctgcaatataaccgttttgacgttcgaatagttcgacatgtcttgtagtatgctttcctcgatttaatgattttgatatatcatttgtctcaagattaagttctggacgataatgatttaagaaagtggacttaccgacacctgattgaccactaagtactataagtccagctggccaagcttctacaattttttttcgatcatcatcatttccaataaattcagtctcatagccaatattttcatatattttcaacaactcatttatttcgaactgcttttcaattggtgttttatcttttttagtcaccaaaattctcgcatttaactgatacgaatgtgcaataactaaaaatcgatctaataattgcgttgaaaaatttggctcgacagcactcattacaattactagtgtatctatattacttacaggtggtcttttcaactcattttcccgctcaaacacttgatgaatataaccttcgttaatgttttgaacttcaaattccactatatcaccaactaccggtgaaaattttttctttctaaataatcctcgtggttttgtattgaaacgttcgccattaacgtctacttgatataccccactaattgatttcactattcgacctgtcttcaaaatggcacctctcgattaattttactgcatttattatatcaaagactggaaaattaatatataaatgatcatttcaaatgatataaatattgtgagagtgatacagaattgatagacaatgctcacctgtatatgatgacatgaagcattttaaaactaccgcaatctcaacataaaaataccgagacttccaaatagaaacctcggtacatttacttcaattatatttatacatcatcatagctgacttctttttcagctacagttttaccgtcaactttaacaatataacttgctgtttttcctttttcaattcttaaaggaatgtctatacgttgatcactagtaatatcgaaactacctttttcagttgaaccgtcattatctttatctttaatataaactttaactttttgtgacttatcatttttaccagtgtatggtacatctaccgattcagttgtcgttttgacatctgatgagtcactttttttacctttagaaacaacaaatgaaatcgttgacccctcatctactgattttcctttaggagattgagaaatcacatcaccctcatcaatatcgtcactatactcttccttactttcaactttaaaccctttttcttctaaggcttttttagctttgctaaaggatttatgttcaaagtcttctacataaacttgcttaatgcctaaagattcatatagtttaatattagaatcatgaatagcgatttcagtatttgcggttacactttgatttgcaatgtatccttttggcgcttgattattatatactttttcaatcgtaacatctttaagacctaacgattttaatttctgcaaggcttcctccttaggtaaaccaatgacatttggcattttaaccttttcagggccctttgatataacaacatcaacactgtcaccacgttcaacacgttcaccagtattaggagttgtcttaataatttcattttcaggatatttatcactataacttctagaaattttacccaatttcaggttgtttttattgaatatttgctctgcttcttttacagatttcccgattacatcaggtgtctcttcgtatttattaccaaacattgccattgccacaaaagaaacaagtgcaatcattaacaacgaaaagattagtgataagagcacaatctttcgtgttgatttctttttaggttttggttcgtacaccgtaccttctggcttttggaattgctgatgatgagcaggcccatttacaataggtacttgcgtcgtttcacgtttaggttgattcgacttatgttcactaatatgctttgctagatcttcttttttcaaaggtaccgctatcgttttcattttatcgagttcatagacatcttcattcgctcgattttcatgtaaaacactactcaaatcatctttcatttcttgaattgttttgtaacgattcgctttgtctttttctgtagcgcgtaaaatgacattacttaaagattgcggaatatccttacgtacatctgttgtcacatttggcacagaatcctgaatatgtttaatcgcaatgctaactgcagtttctccattaaagggtggttcaccaacaagcatttcatataacacaatacctatagaataaatatctgtacattcatccgttgcctcaccttttgcttgttctggcgaaaagtactgcacagtacctaacacatgattagtctgagttaaagacgtctcacttaaagctttagcaattccaaaatcaaatattttcaacgttttattgctgtcaattaatatattttgtggcttaatatctctatgtacaatacgcatatcatgcgcatgtttaatgccatccaatatttgattcgtaaaattaatcgctgtgtcaacacttaatggcccatgactttcaatatactcagacaaagtcggaccttcgatatattccattactaagtagtaacagtcatcttcttcatcaacatcgatcatacttactatattttgatgtgatagctgtgatgagttatgtacttctcgttcaaaacgttttaatgtttcttctttttctctaggtggtataaaaatcgccttaattgcaactttaatgttaagtatcgtatcttcagcaagataaacggtactcatgccaccgccgccaagcttatctacaattttatatcgttcatttattattttacctatcatactttatcaccttcaatagccgcgagtatgaaagtaacgttatctttcgaatggttatctaatgccaattgcattaattgatcaccatgatcttctattgtaccttcttttactaacaaacgcttaatttcattgtctttaacataatcagttaatccatctgaatttaataataaataatcataaaaatttaatcgcttaataaacaaatctggactcacacgtttatctgtgcccatcaccttcgtaataatattacgttgtggatgtgtaaatgcttcttccggcgtaatttgacccgttaaaacaagatgattaacaaatgagtgatcactagtaatttgttcaatttgtcgactattaataacataggctctagaatcaccgacatttgctatcacaactgatttttcaaaaacaagtgcacaaacacatgttgtacccatacctttatattctgcattttcttgtgcatagtgatataactgaaaatttatatcttttatattattacgcaaccaattttcagcttgatgttgttctataagattttccgcttcaaaacgggatttcaactcatctgtaacaaatttacttgcaacttctcctgctttatggccacccataccatcacacagaactaaaagttgttgattagtttgattataaaaaataccacccgcatcttcattcttatctctatgttgtccagtatcagtaaaaaattgtgcctctagcatttgtctttacctcgtttctacttgtcgttcctttgctcttaattgaccacaagctgcgtcaatatccgaaccttgttcacgacgtattgtggcattaattcctagtctctttaattctttttcaaatttaaagatatcatttttagccgttttcacataatttctttctggaacatggttgacaggaattaagttaacatggcagtttaagccttttattaaatgtgctaattctcttgcatgttctagttggtcattcacaccaccaaacagaccatattcaaaagtaacacgacgatttgttttttcttgataatattgaattgcttcgattaacttctcaacattatatgcacggttaattggcatcaagcgtgatcgcacttcatcttttgcggcgtgtaagcttacagcaaaattaatttgaatatcttcatccgcaaagtcatatattctaggaatgatacctgatgttgatactgtaatgtgacgtgcaccaatatttaaactgttatcatcattgacgattcttaaaaagtccatcatttcatcataattttcaaatggttcaccgatacccattatgacaatttgagatacgcgctcttctgtagcatcaagggctttttgaactgttaaaacttgtgaaacaatttcgccagcttcaaggtttctttttaagccgccaagtgtagaagcacaaaacgtacatccgatgcgacaacctacttgtgtcgttacacatactgaatttccataatcatgtctcattaaaacagtttcaattgtatagccatcttgtaattcaaataagaatttaattgtaccgtctttactttcttgttttactacagttgttaaagttgtaacagtaaagttatcttttaaaagctgtcgtaagtctttcgataagttcgtcatttcatcaatcgaatctactcttttttgatataaccattcaaaaatctgtttcgctcgaaatttttgttgcccttgttcaacgagccagttttgcatttcgtcaaatcgcaatgaatatattgattgcttgtcaaaatttggaagaaatttattcttctttttcttttcagcagttatcattcctaattgtcctttctttttatcttagtgataaagaatccatctgaattaaagtcttgcggcatgatttgtaacgttttgaccaactctccagttatcggatgttgaaacggttcaaattcgaagtttttattatttttcaaaaacgtataaatcacgttttcattttctagttgctcaattgtacatgttgaatagatgatttcgccacctatttttacattgttttttacattttccaatatttcaagctgtaattcaactagtgactcaatatgttgtttgctttgagtatacttaatctccggcttatgtctcattacacctaatccgctacatggtgcatcaacaagtatcttatcgtatgttttatcataaggttttgtcgcatcatgttgaaaagctttaatatttgttaatcgtaatttttttatattaaaattaattaagtctattttgtgatcatgtatatctgaagcgtcaacttgcccttctggcattaaaacttcagcaatgtgacaagctttaccgccaggtgcactacatgcatctaatacgtgatcatgtcggtctacattcataatgtgtgcaacaaacattgagcttttatcttgaattgaaacgaatccatctttaaatgaacgagaatgaataattggttgtcctcctatatggagacaataaggtaagtcatgatctttttcaacgtcataaccttcgtcttgcaacttttcaataatatcatctaatgatgctcgcgtcaggttggcacgcacagttgttgatgtcgtttctaaaaatgactgtaaaattgtttcagtttcttcgagaccataatgtgttgcccaatgatctataatccacttcggcatactatactcgattgccattctttttttaggatctgcaatttcattaaaatcaggtaagtcactacgcatcattgtacgtaaaataccatttacgacattaccattatgatagccaccgcgttcttttgctatttcaactgcttcattaataatggcatgatttggaactttatctaaataaacatattgataaatactcatccataataattgcctaacccatgccttaatctttgttttcacaaaaggctttaaataaaaatctaacgtatattttcttttaacggttccgtagacaatttctgtaaataaagccttatccattgcatttaattcattttctgacaacacttcattgatacgcaagttactatacgcaccttcatttaatatatcttgaatcgtgtcaaaagcaagacttctcacgttttctatcatataagtttcttccctactagtgtgttttgcgcaccacttaaataattggcagctaacattctctttttcccagctaattgcatatctttaattgcaacagcttcattatcatttgtagcaacaataatggcttttttagtcgtttctataatggttccaggctcgtttatcttattagtctcaacgagttcagcatcgtatattttcaagttagtgtcatccatagttgtataagcaactggccatggtgataatccacgaatttgattaaacacttgtcttcctggtttattccagctaattcgctcatcttcgcgtcgaatattggaagcaaatgttgcttgcgtatcatcttgaggtacgctttcatttgtgccctctataatagatggtaaagtttcttttaataaatctgcccctaatacacttaatttatcatgcatcgtaccgacattatcattttcttctattttaattgcttgttgcgaaataatattacccgcatctaattttttaaccatatacataattgttatgccggtttcttgttcaccatcgataattgcctgatgaattggtgcaccacctctatacttcggtaacaatgatgcatgtacattaattgccccaagatttggtaatgccaacaatgattcaggtaataattgtccaaaagcagcagttacaattaaatctacatctaattgaagcaattgttctaattcttctgatccacttaatttttcaggttgatatacaggtaaatcatatttcattgcaacttttttaactggtggtggtgtcataacacgtttacgtccaacaggtcgatctggttgcgttacgactgcaatgacatcatgttctgcaataagcatttctaaaacagttgttgaaaagtctggtgtacccataaatattattttagtcatttataaaatatgcctccacttctttatctgttaaaatacggtccgcacgttctgtaaaagggataccgttcatttgatctataatatgcaaaatcattcttgctacatcttcatgtgcagttagttcaactttgttcccattgacgtcataactttcgacaactatcattttacttcttgtcacttcgccgtaaacatctggcaatgtaattgaaccttctaagtctgttattgtttcatttgattgactaataattttcggattaacaagttgtaataatccttccatttccatatcaataattgccacttgcaatgactgattaatttgaggtgcacataagccagcagcttcttgtgcatacattgtatcttctaaatcttgtaataatctttttaacgaatcatcaaatgttttaactgcttgcgcttttttcgttaaaataggatgcgatgctggtactaactttttaatcgccataactcttactcctcaataaaattcatcaaactattataacgtaaatatattaaaaatgcgaccttacatcatagaatgtatatttttcaatttgaagattgtcatgtgattcattacgtatatttcacacgtaaaataatacaatgcaactgaaatgtaatcctaaatttattgtaaggattgaataactgaaatttagatgattgggaatgcttaaactagaatgtttgaactaaaagtgggtataataaaaagagaagctaatgtcattataagcaattcaactggagggaaagaaatgcaagtaaacaaagttatttatattttattagcattgttcttaggtagttttggtattcataaattttatgccggcaagaatatgcaaggtattctacacttaatattctgttggacaggtatcccacacattttagcaattattagtgcagtgattactgttttcaaacctgctgatgaacaaggtaatgtcactttataaattgataaaaataaatcccgatgacaatcatttattatttgcgaatcatagagttatagttattacgaactctatgtgataagcagtaatgctgattgtttatcgggattattattgcgattatttaatgtagtacactatttattttttacacagtaaatactattttaaagaatcatctgacgctgtttcatagtttgattcatactctttaatatatttacttaaaacaacaaaatgtgcgttaccaaaatcactagatgcatttaagaaatccatatgtactaaatttaaaacttttggatctggattagacttgtcttcataattttttggtgaaaaagtgaaataggccaatgccggcaacacttcatctttagtatcctttgatccatgtgtcataaatgaaacgcttgttaaaggtactccgaaagatttgatttgagctacgctatatggaactggttttggatgatcaagtttagttagctgacttaatttttttaacttagaataatcgtcatatttaattgcatcatctttatgtattacgtaagatcctggttcgactgatgcataaactaactttccatctttatattttgtcataatttctgcgtaaaaaacaggtgtgtttgaattgccaattttctttccatctggatctacataccaataatcaacttgttttacatcatcgtgtgtttcaatcactttcctttttatacctttcttacctttaaagaatgcatcaacatcttttattgaagatccttttgaatctttagtaaatctataatctgcaagttccactttacccattaattctttgtaatctttccatccttgaatccctttactattcgtaaacgacttttctgtcattaatggatccaacttatcaagagatggcgcatctttaattcctttcattttcttctctatttcttcatatttctctaaatctggatctttctcttcttccgattctttttttacagtttcttgttttgattcttctgatttctttgatgataatttatgattcccaccaaaagaacaacctgctacgactaaaagcataattaaaagtaaacatcccagtgtctttttcataaactttctcctcttaagttattttgtttgaatcaaataaacatacataaatttaaaaaacttatttatattgatattttacattaaccatcaatatttttaaatactttaattgataatttaagaaaattgttttgtctaataatttaagtagttaaaacatagatagatataaaatagtttatagccattaatttataagtttaaaattcgcactatttcaatttgccatttaaaaatagtttgtttaatcattagtacttttattcatcagtaagtatggcgcttgcattaaaatcagaattcgtaaatgaaaatactaataaattccttatcaaaccaaaatcacgtaagttataaagccatataaaaagacagaatataaactgctaatttaaatagttaacagttgtatattctgccctttttctgtacttaaagtaaatattcaaacactggttcaaatactcgtacatactgaacttgtttctaataattagtaatgttacatcatcatctgtggatcaatatcaatcttcaatgctaatttttcttttataaatttttcatggtaatagtcatctaaaaactgaatggcttgtaataatccaggttcacttttatatttcactaaaatttggaatctaaattcattgttgattctcgcaagtgctgccggagatggacctagtacaagcgctttttctgttaaatgctgtaataaaattttatgaacatgctgcgatgctaccataaccttcttcatttctttatgtgagattgtgaaattaatcaaataataatacggtggatactttcctaatttacgatattccatttcctgacgataaaatgttaaataatcatttttttgaacatccaatattgaataatgatctggattatacgtttgaatgatgacttgacctgccttttcatgacgaccagctctaccagccacttgcgttaatagttgataagtacgttcgctcgcccgaaaatcaggtaaatttaacattgtatctgcattcagcacaccaactaaagtaatatttggataatctaatcctttcgcaatcatctgagtacctagtaaaatgtcaccgttacctttttcgaattcagtcaataacttttcatgtgcacctttctttgaggttgtatctacatccatcctaattatgcgcgcatcttcaaattcttgttgcaatagttcttcaactttctgagtaccagtacctacttgtcgaatgtgttcactctcacaatttggacattgattcggtggcgtctcttggtaaccacaatagtgacattttaataagtctgtcgttttatgatacgttaatgaaatatcacagtttggacattgcggtacatatccacaatcccgacataacataaacgatgcataaccacgtcgatttaaaaataaaacaacttgttcctgtcgatctaatcttaattgtatggcttcacgtaaatcttttgaaaacattgaccgattaccttcactcaattcttcacgcatgtctactatatcaatttcaggtaaagcttgttggttcactctgtttggtaatgatagcaaatgataaacgcctttttcagctcgtgcataactttcaagacatggtgttgcacttcctaaaatgactggacagtgatgatattcacttcgccattgggcaatttctctagcgtgatatctcggataatcttcttgtttatatgtagattcatgttcttcatcaatgatgattaaccctaaatttttgaaaggtgcgaacacacttgaccttgcaccaacacttactctcgcacgaccatccctaattttttgccattcatcataacgttccccattagataagccagaatgtaatacagcaacgtcatcaccaaatcgacgtttgaagcgtaaaaccatttgcggtgttagagcgatttcaggaactaacatcatcgcctgttttccttggcttaaaacatcttctatcgtttgtaaatatacttctgttttacctgatcccgtcacaccatgaagtaaaaatgtttcttgctcttggcttacaattttagctttaatcgcttcatatgctttatattggtcttctgttaattgctgttttgattcttgttcgaaaacacgatctttaaatgggtctctttcaacaaccgcgtcatatttttcaacataaccttttttgataagtccatctaaactggattttgaaaagcccatatcctcaatatcagttaaaaatattgttttatgttgttcttcagacaagtaagcatacaaatcgtattgtttaataactttctccaacttagctaatacttcatcaggatgatacccttcaatgacacgaacagcacgcttggtttttttagttatattttgtgtgagaatcgttttttcttcaacgatatcatcttttaacaacttcataagcaattgaatatcattatttttttgcgcatctttataataatagtaaccatgcttatcaaatttttgtaataaagctgaaggtagctctatgtcatctttcatcttaaatgcttttttatacttcgctttaatagcactcggaagcatcacttctagcatagaaatacgtttaatgacatgagttgaacccatccactcacttaaagctattaattctgatgttaattctggttgtatatctttcacttctatgatttttttaacttcgaaacgtcaagttgtgcatcaggttctgctgttacttccattacataaccttgaatcgttcttggtccaaaaggtacaattacacgcacaccaggttggatgacagattcgagttgttcgggaattatataatcaaatttatagtcaacgctcttcgacgcgacatcgactatgactttcgctatcattattgccacctagtttctagttcatctaaaatttgtgcagctaatactactttttttcctttcttgatatttactttttcattatttttaaaatgcattgtcaattcattatcatcagaactaaatccgatagacatatccccaacattatttgaaataatcacatctgcatttttcttgcgtaatttttgttgtgcataattttcaatatcttcagtctctgctgcaaagcctattaaatactgtgatgttttatgttcacctaaatatttaagaatgtctttagtacgtttaaaagatactgacaaatcaccatcctgctttttcatcttatgttctaatacatcaaccggtgtatagtcagatacggctgctgcttttacaacaatatcttgttcgtcaaatcggcttgtcacttgttcaaacatttcttcagcactttgaacatgaataacttcaatatcttttggatcctctagtgttgtaggaccagcaactaacgtcacgatagctcctcgatttcgcaatgcttcagctattgcatagcccatttttccagaagaacgattggatacaaatctgactggatcgataacttcaatagttggtcctgctgtaaccaatgcgcgtttatcttgaaatgaactattagctaaacgattactattttgaaaatgagcatcaattacagaaacgatttgaagcggttcttccatacgtcctttagcaacataaccacatgctagaaatccgcttcctggttcgataaaatgatacccatcttcttttaaaatattaatattttgctgcgtacgtttattttcatacatatgcacattcatagcaggcgcaataaatttcggtgtctctgttgctagcaacgttgatgtcaccaaatcatcagcaatacctacactcaattttgcaattgtatttgccgttgcaggtgcaacaatgattgcatctgcccaatcacctaatgcaatatgctgtatttctgaaggattttcttctataaaagtatctgtataaacagcatttcgacttattgcttgaaatgctaatggtgtcacaaatttttgtgcgtgattcgttaacataacgcgaacttcatacccagattgtgttaacttacttgtcaaatcaattgctttatatgccgcaatgccacctgtaacggctaataatattttcttcatattcaatctcccttaaatatcactatgacatttacgctttacatcatcatatgcgcacaaatgctcattacttttttatagatacaaatttagtattattataacatcaatcattggataaactaaaaaaacacacctacataggtgcgtttgatttggatatgccttgacgtatttgatgtacgtctagcttcacatatttttaatggtcgaaactattctttaccataataatcacttgaaataacagggcgaattttaccgtcagcaatttcttctaacgctctaccaactggtttaaatgaatgatattcacttaataattcagtttcaggttgttcatcaatttcacgcgctcttttcgctgcagttgttgcaattaaatactttgatttaatttgtgacgttaattggtttaaaggtggatttaacattattttttagcctccaaaatcatttttctatacttagcttctacgcgctctctttttaagtgctcagcttctacaatacattgaattctattcttcgcaagttctacttcatcattaactacaacgtaatcgtataaattcatcatttcaacttctttacgcgcttcgttaatacgactttgtattttctcatcagattctgttcctctacctactaatcgctctctcaagtgttctaaacttggaggtgctaagaaaataaatagcgcatctggaaatttctttctaacttgctttgcaccttctacttcaatttctaaaaatacatcatgaccttcgtccattgtatctttaacatattgaactggtgtaccataatagttgcctacatattcagcatattctataaattggtcatctttgattaaagcttcaaacgcatccctagttttaaaaaagtaatctacgccatcaacttcaccttcacgcatttgacgtgttgtcattgaaatagaatacttatatgatgtacttggatcttcaaatattcgttttctaacagtacctttacctactccagatggtcctgataaaacgattaacaatcctttttcattatccatgccttacgacctctctaagctaatcttctattatttaaatatgatatcacattgttctttatattgtatagcatatttgaaattgcatgccataatttctattaagtctaacaatatcgttatattgcacgattaattttaattaaataaattgaattgcaaacttttagataatgtaaaatgtatggcataatgtatggttcaataactatactgaaaagttacaatcatgttaaaatgaaacgaatgatatgaagaaggtggaagataaattatggcttatgatggcttatttacaaagaaaatggttgagtctctacaatttttaacaacaggacgcgttcacaaaatcaatcaacctgataatgacacgatactaatggttgtacgtcaaaatagacaaaaccatcaattgttattgtcaatccatccaaacttttcaagattacaattgactactaaaaaatatgataatccatttaatccacccatgtttgcgcgtgtttttagaaaacacttagaaggtggtattatcgaatcgattaagcaaattggtaatgatcgtcgcattgaaatcgatataaagagtaaagatgaaattggcgatactatttaccgcactgtcatccttgagattatgggtaaacatagtaacttaattttagtagatgaaaatcgcaaaataattgaaggatttaaacacttaacaccaaatacgaatcactatcgtacagtaatgccaggatttaattatgaagcaccacctactcagcacaaaataaatccgtatgatattacaggtgcagaggtgttgaaatatatcgattttaacgcaggtaatattgctaaacaattattgaatcagtttgaaggatttagccctttaattacgaatgaaatcgttagtcgtcgtcaatttattacttcatcaacattaccagaagcatttgacgaagtaatggcagaaaccaagttaccacctactcctatttttcataaaaatcatgaaacaggtaaagaggatttctattttataaagttaaatcaatttaatgatgatacagttacatacgattcattaaatgatttgcttgatcgtttttatgatgcgcgtggcgaacgtgaacgcgttaaacaacgtgcgaatgatttagttcgatttgttcaacagcagttgtacaaatatcaaaataaattagcgaagttgattgaagaatatgagcagtctaaaaataaagatactgaacagttatatggtgaattgatcactgctaatatatatcgaattaagcaaggcgataaagaagtgacggcattgaattattatacgaatgaagaagttgtcattcctttaaatcctacaaaatccccatcagcaaatgctcaatattattataaacaatataatcgtatgaaaacgagagaacgtgaattacaacatcaaattcaattgacgaaagacaatatagattatttttcaacaatcgaacaacaattacatcatatttctgtccatgacattgatgaaattagagatgaattagcagaacaaggctttatgaaacagcgtaaaaatcaaactaagaaaaagaaagcgcagattcaattacaacattatgtatcaactgatggcgacgatatatatgttggtaagaataacaagcaaaatgattatttaacaaataaaaaagctaaaaaaactcacacatggttacacacaaaagatattcctggttcacatgtcgttatatttaatgatgcaccaagtgatacgacaatcaaggaagcggctatgttagcaggatacttttcaaaagctggtaattctggacaaatacctgttgattatacattaattaaaaatgtgcataaaccatcaggtgcaaagcctgggtttgtaacatatgacaatcaaaaaactttgtatgctacacctgattatgaacttattcaaaaaatgaaacaatcataatcaagttgtcgacaaataaacacctcacaaaagaaagtagtcctttcttatggtgaggtgtttatttattatttaatgcgttcattgaaacgaagtatcgtgtttttaaataacgtatcatcatttaagttacaaattatctttgtgattttaaaaatgagtgaaactaaaatgctaatgtgtacttaaaatagaaatacataggtaaaacgcatgcataagaaaaagtgtttctttatcattcaacgctgtgcgaatccttttactcaggtaatgctaattgaaaacttactccaaacttatcttgaacccaagcaaactctctgtatggtggcatattcgtttttggcattaaaatggcaccttcatcttttaatccattaaatagtcgttccatttcaatagtatcttttactgtaacaaataatgaaatcgcaggattcattggtaattctgtgccactattagcatcaatcgccatgaatacttgtccatttaatgtaaatattgagtgttgtacagtcccgggatcaccaggtccattttcaccatacttagccattgttataatctcactatcttcaaataagcttgtgtatagtttaacagcttcttcagcttggttattaaacattaaaaatgtcgtgatttttggaatatccatgctatgcctcctatagattgaacttctataactactattatcttaacataattaaaatgacaaaagcgcgtcgtaccgttatgtgcacgaatgacaaacgtcttattggcctgttgattaaatcacatagttaacgataaaaattacgcaagattaaaaatatgatacatatgttaataaatgatacttatcataggtattaatgttttgacttattgtcaaatttgattacaattaaaattaagttaaaggagggacgttatgttacattatgtgattccagtattagtcctattactcgtattcttaattggttggattttaataaagttaattatccgctaataaattttttatataataaaagctatagtgtttgtaatattcggatgcggttaagcagcccctgatattaaacactatagcttttttgtttttaaatttgttcttgtttacgtaatatatcctttacatgtttaaataaatcatcattatgatctatagttgttttattttttatatgtttttgcttcgttgaactttcgtcgacatcgtgactactagatagattggaatcatttgaatgattgataaattcgttacaatgttttatcttcccatataaatcattagatgttttgtcattcatttgttgaattcctccttctagtgtctatattatgctaagttgtctctccattcaactaatgtttggatatcttcactagaaattttaccttcattttcagctacttcaattaattcattgtaatcacttaaagtgtaaaaaggtagttgaatattgctaaatgtatcatctgcttttttcaaaccgtaagtaaagatagctacaacacctaatacttctgcacctgctagttttaaggcttcaactgctgtgactgaagatccccctgtcgaaattaaatcttctatcacaactacttttttaccttcacttttagcaccttcgatttgattttgcttaccatgactcttatttgatgaacgaacataattcattggtaattttaatttttcagcaataaaagctgcatgtggaataccagctgttgcagtaccagaaataacttctacttcaggaaagtgttctttaattaagttaattaaaccatcgcggattgcgcctcgaactaaaggataacctaacgtaacacggttatcacagtaaatcggtgatttaatacctgaactccatgtatataaatcatttggtgataatgttacagcttcaatatctaataatgattttgcaatttctttagccattatactaaccaactttctttaattttatgataactttcgactggattgtcactttttgtaatcggtctaccgactacaatatgcgtcgaaccaagctgtcttgcttcttccggtgtcgtaatacggtgttggtcattttgagatgcacctttaggtctaatacctggtgttacttttaaaaatgatgtacctaacttttcagtcaacatacgactttcaagaggtgaacaaacaacgccatctaaaccagctgcatttgctaacttggcataatttaaaacggcctcttcaatcgatgtttgtatattttgttcgtgtcgtaacatgtcttctgttgttgacgtaagctgtgttactgcaataatttttgtatcttgattatgttttcttaatcctttaatggcctcagacatcatttttacgccaccagcagcatgaacatttaccagatcaacattcaatttagctagtccttccatcgccttaccaactgtattaggaatatcatgcagttttaaatctaaaaatacatcatggcctctttcttttatctcattaattaattgaggaccttcttgataaaaaagttccatacctacttttacgaataatgattcatcaaataaatctaaaaattgatttactttttcttttgattcaaaatctaatgcaataattggtaaatctttcatcatatatgtctccctttatattaagaaattcattaaaataatgaggctgtaatataaacttctttaagtaaatggttaattacagccccaccgatacagtttgattgatttacatttgacgcattgtaaatgtcatactttcaattacattcgttaaggcattagctgtatctaaagatgtcaaacatggaataccattttcaactgtagtacgtctaatttggaagccatccctttctacttctttacctttagtcattgtatttataacgatttgaacatcaccattttgaatacgtgttaataaatcattttcgccaccaattttgcctactacttctgcaggtatgtcatactcagctaatttattagctgttccagacgttgctaaaattttatagccaacttcatttaagcgttgtgccaatttaacaacttcctctttatctttgtcactgacggtcattaatactgtaccgtgatctttaacttcaacgccactacctgttaaccctttgaataacgccttttctaatgtagtatctttccccatcacttcacctgttgacttcatttcaggtcctaaagtaatatcaacatttttcaatttattaaaactaaatactggtgctttcacaaagacaccctcagcatatggttgaaccccttcttgataacccatatctgttagtttttccccaatgattgctcgcatagctaattgtgccattggaatatcagtaattttacttaagaatggtaccgttctactagaacgtggatttacttctaaaacatacacaccatcgtgagctataacgaattgaatgttgattaagccaatgatgtttaaacctttagctaattttatagtatagtcctcaagtgttgctaactcgtcttctgtcaaagtttgtggtggatatacagcgattgagtcaccactatgcacaccagcacgttcaatatgttccatgattcctggaataatgaccgtttctccatcacaaatcgcatcaacttcaatttctttaccagttaaatatctatcgactagtaccggatgttccggactcgcttttacagcctgggtcatatagttttctaactctttgtcattgtctacaatttccattgcgcgaccacctaatacataagaaggtcttactacaaccggatatccgatttctgcagcattcgctaatgcttcctcaggtgatgtagctgttttcccttgtggctgtggcacgttaatttttcttaatagtgcttcaaattcttttctatcttcagcacgatttagattttctagtgaagtaccaagtattttaacaccatgtttagccaatttgtctgctaaattaatcgctgtttgtcctccaaattgtacaacgacacctttaggtttttctaaattaatgatattcatcacatcttcttcagttaaaggttcaaagtataatttgtcagaaattgagaagtctgttgaaactgtttctggattgttattcacaattatcgcttcgtaccctgctttttgaattgcccaaacggcgtgaactgtcgcatagtcaaattctacaccttggccgattcgaattggtccagagcctaatactaagattttttctttgtcagtaactatggattcattttcagtttcgtatgtaccataataatatggtgttgaagattcaaattcagctgcgcaagtatcaaccatcttgtaaacaggtttaatatcattttccatacgcaattgatatacttcttcttccgtcatattaaagcgatgcgctattgttttatcactaaatccataatcttttgcatatttaagatattctaaatcaccttgatgctcttttaattgatgctcaatatcaataatgttttggaacttgtgtaagaagaagtaatcaatctgagtcatattatgaatttcttctaatgttgtgcctcttctaattgcttcgccgatgaaaaataatcgttcatcatcttggtgtgaaatacgttctttaatataatcaagatcgaagctttcaccatttggtaatcctaagtgatgcacaccatactcaagtgatcgaattgcttttaacaatgattcttcgtaagttcgaccaatggccataacttcacctgttgctttcatttgtgtgccaagctctcgttctcctttttcaaatttatcaaaaggaaatcttggtatttttgaaatcacatagtctaaagttggttcaaacgctgcataagatgttcctgtaattggatttaacatttcatctaatgttagaccaaccgcgattttagcagctaattttgcaataggatatcctgttgcttttgaagctaacgctgatgaacgtgatacacgcggatttacttctataatataataatcgaatgaatggggatctaatgctaattgaacattacaaccaccttcgatacctaaagctcgaataacttttaatgaaacatcacgtaacatttgatactcaacatctgataatgtttgactaggagccacaacaattgaatcgcctgtatgaataccaactggatcaatattttccatgttacatacaacgatggcattatcgtttttatcacgcattacttcgtattcgatttctttaaaacctgcgatagatttttctaataaacattgcgttgctggactataatgaagaccatttgagacgatttcatgtaattcttcatcattatgacaaataccgcctccggtaccacccatcgtaaatgccggtctaacaattagcgggtatcccacttgctctttgaatttaaaggcttgctctactgtatttacaatgtcactctctggtacaggaacgtttaaatcattcattaatgttctaaacatttcacggtcttctgcttgttgaattgatgttagctcagttcctaataattggacgttattatcttgaagcacaccactttcgtgtagttgaatcgccatgtttaaacctgtttgaccacctaaagttggaagtaaagcgtcaggttgctctttacgtataattcgcgctataaaatcatgagttaacggttcgatatatactttatccgcaatttccttatcagtcatgattgtcgctggatttgaatttacaagaataactcgatatccctcttcttttaaagctagacatgcttgtgttccagcataatcaaattcagctgcttgacctatgataattggcccagaccctattactaaaattgttttgatatcattacgtttaggcattgatatgacgctccttttccttaaaattagtcatcattgctacaaaatcatcaaatagatagtttgaatctgacggtcctggatttgcttcaggatggtattgaacagaaaatgctggtaatgttttatgttttaaaccttctacagtaccatcatttaatgcaagatgagtaacttctaaatcagtactttttaacgaatctatatctattgcatatccatggttttgactcgtaatatcaacttttccagtctctaaatttttaactggatggttcgcaccacgatgaccaaacttcattttaaatgagcttgctccttgagataatgcaaaaagttgatgtcctagacagataccaaagaacggaattttccctaaaattccttgaatcattggaatcgcacattctacaacttcaggattacctggtccgtttgatagcataacgccatctggagccattgctaaaatttcttcggcagtagttgtatatggtacaactgtgacgttacaacctctgacgtttaattctcgaacaatattttgcttcttaccaaagtctacaagtacgacacttagatccttacctgtcgaaacatacggtgttttagtcgaaacgatttctacttcgtttttaggtaattctacttgttgtaaatgtttgacaagttgatcaatatcttcttttcgatcagtaaaaccagcttttaacacaccgtgttgtcgaattttacgcgtaatacttcttgtatcaacacctgcaatccctggaatttgatgcaattctaaaacgtcatgaagtgtcttttgctgtctaaaattacttggatgcgcactcgcttctttcactacaataccgtttaatgtaggtactaatgattcaaaatcgtctctattgataccataattaccgattaatggatacgtaaaagtaatgatctgacctgtatatgatggatctgaaatagtttcttgataacctgtcatcgctgtattaaatacaatttctcctacagttaagttatcagatcctaaacggtagccttcgtaaaaagaaccgtcttctaacactagataacgtttgctttgcatattatttatccccctcaaatttaacttcgccttcaaccattgttaagatcggatttccataaactttatagccgataaatggtgtattatctgcttttgataagaaatcttctcctttaatttcttgttcactatctaaatcaatgattgttaaatctgcataaccattttcttttaatgtgccgtattctaaattaaatgtctcacatggtttaattgttaagtaatctactaattgttgtaatgtccaatcaccattttttacaaaatgcgtatataataatgggaatgctgtttcactaccaacaattccgaatggtgctttttccattggttgtgctttttcatcacgtgcatgtggtgcatggtctgttgcgatacagtcaattgtaccgtctagtaacccttctaacaaagcctctctatcttcagtacttctcaatggtggattcattttataaatggcattattaccaggaatatcatcttctgttaacaataaatggtgtggtgtaacttcagctgtaacatgaatgcctgcgcgtttagcgtcacgaatgactctaacactttctttagtagaaacatgacatacatgataatgacaacctgctgcttcagctaatagtacatctcttgcgatttgaacagattcacaaatgtttggaatacctggtatacctaactctttactgcgtttcccttcatgcattgcaccaccatagattaatgaattatcttcacagtgtgctacgatggctttgtttacttttgcagcttcaatcatgccttcatacatcatgcttgcagtttgtactcctacaccgtcatctgtaaacgcaaaggcaccttcttttactagtgctgggaaatcaaccaattctttacctaattgacgtgttgtaattgaagcataaggtaatacacgtacttgagcattgtcatcgattaatttttgtaaagcttcaaaatgttctacagaatctggtaccggtcttgtgttaggcattggacatacagttgtaaatccgcctctagcagcagctttagtaccagtttcaattgtctctttatattcaccaccaggttcacgtaaatgaacatgaacatcgacaaatccaggtgacacaaagtgacctttcgcatctatgatgtcaacaccattgcttggttcaattgcaggtgcaatttgtttaattaccttaccatcaattaaaatatctgcttgttgtaattcgccattttgtaatactttaccgtttttaattaatttcatcattttcgtccccttacctattttaataattcatcaatgactgccattcttaagtaaacgccattttccatttgcttaaaaattcttgattttgaagcttctactaaatcgctttgtatttctactcctctattcacaggtgccggatgcataacaatagcatgttcttgtaatttgttatagcgtacttcatttaagccatgcttttgatgataatcatctgctgcaaatctagtttcttctgcaagcccatgcctttcatgttgaattcttaataacataactatatctactgtttctataacatcatctatatttacataaggtgcttctaaagaatcatcaatccaagcatttgggctattaaacattacgtttgcacctaatgcttttaaactatggtaattactacgtgcgacacgtgaatttttaatgtctccacaaatcaatacattcaagccttcaaaatatccatattcttcatatatcgtcattaaatcaagtaaactttgtgttggatgttgtccactaccatcaccagcattcgcaattgggatgttaatattcgctaatttttcatagtagttattaaacggatgtctaatgactaataaatcacagccaatactttctaaagttttacatgtgtcatataaagattcaccttttgaaacagatgatgttgatgtttcaaagctaatcgtttttaaccctagcttaagttctgccatttcaaaactacattttgttcgagtagaattttcaaagaataaatttgcgacatatttcccttcaaagtttggtagttgacgttcaccagatttaaattgacttgccttttggataagtttgtatatttgatctgtagataaatgttccattgataataaatgattcataaaagcgccctccttaatttgtaaatcttaattgttttgttttttctctttaggtaagattaagttcaaaataattcctgaaagtgcagctaatgccatcccctcaatttgaaggttgataccaatttcttttaagttaaatactaaattaccgatacctacaactaaaattacagaagctataactaaatttcgattgttcgcaaaatctactttgctttcaactaacattcttaagccacttgctgcaataataccgaaaagtaatatagatactcctcccataactggtgtaggtatagaagaaattaatgcagtgaacttaccaatgaatgctaaaacaattgctataactgctgcaccaccaatgacgtaaatactgtatattctggtaatcgctaatacaccgatattttcaccgtatgttgtacttggtggtccaccaataatactggcaaacattgtagaaacaccatcaccaatgattgatttatcaagtcctggcttttcaaagaagtttctacctacgattttattcaataccatttggtgcccaatatgttcacttactgttacgaacacaatcggaatcattacaagtacaagtcctaagtgaaatgaaggtacataatctttaaatggcagataaatatgagggaaatctatccattttgctgacataattgcatcaaatttcacaatccccataaaaatcgctaccacataacctacgataatacctacaagaactggaattaaagataggaatcctttaaaaaatccttgaacgactattgttacaagcaaggttatcattgcaacaattaagaaactgatattgtaacctttcatatctccaggattttcatacattgccatattgactgcagtaggcgctaagcttaaaccaattaccatgatgactggtccaacaacaactggtggtaataatttcattaaccatgctgtcccacttaatttgattagaatcccgatgatgacgtacataacaccactcatgaataatgctacaagcatgtctcctaagctatgcgtacttaatcccgtgataattggcgtgataaatgcaaagctagatcccaagtatgctggtatttgcgccttcgttattaagatataaagtaatgtaccgattcccgaagctagtaacgctgctgatattggtagtcctgttaagaatggtactagtactgttgcgccaaacatcgcaaataaatgttgtaagcttaaaaatgcccattgcgctggttgtggtttttcatttacatctagtacgggttttactgttcgttcaaacatttcatcattttgcataatattcatttcctccgataataaaaaaatctctttacatcagtatatgtaaagagacaaaaagtgtgacaagttgctacaagtcattttcgtccatagaaattgacttatagttgtcgaacatgagggtattattagataaacaagcatatgaaaacttatttatcattcaactcccccacctttttcagtctctcgtactgaattaaaaggggtattatttaattataactgcatttctttgatccatttcttctaaatagacacttaccgtttcctctttagaagtaggtatatttttaccaacaaaatctgctcgaattggtaactcacgatgtcctcgatcaaccaaagcagctaaaccaattttaataggtctagcatttagcaaaatagcatcaagtgaagcacgaaccgttcgaccagtatacagcacatcgtcaataatgatgactactttatctgtaatatctgtgtcgatgtctattgcgtcttttgtcgtaagtgatgacatgtgctctatatcatctctaaagtatgtaatatcaattgttccagtaggtatacgttgttgctcaatttgatgaattttatcttgtatacgattcgctaaatattcacctcttgttttgatacctaaaagaattaaattatcagtacctttgttatactccaaaatttcgtgagcgattctcgtcactgtacgttgtattgcggcatcatccattatgatacgttcagacatattctcaccctttcaaaatttagaaacaaaaaacctcatgtctttaatatcgacatgaggtttagtatatacaatcagcctatttacatagaagaatcgtagtattactacttattcttgcatatgtgaaagtgttatgatcattttagtatatatctatattttcatgtctttgacgtctctctggacgctcaattaaagactctttatgttgtacttaaactgttataaggataatactaatcaggcgctttgtcaatctatattgaaaaattaaccatactcagtaaaaatgttaaccttaatctattttataatgtgttttcatttaaaaaaaacgaaaacgataaacacttatagtttacataataatgttatcgtaattatagcacgacacaattatgcatctctttttcgaattgtatctaataaatcttcaaagtcttgtggtaattcagcatgtctttcaatatattcacctgttactggatgttcgaatccaataagtccagcatgtagagcttgaccaccaatatccaatgtctttttcggtccatactttggatcaccaactaatgggaagccaatatatttcatgtgaacacggatttgatgcgtacgtcctgtttcaagttgacattcaacaagcgtataatctttaaaatgttctagtacgttaaaatgtgtcactgcttccttaccatcatcaacaacagccatagattgacgatcatttttgtttctaccaattggcgcatcgattgtaccgtaatcatgaggaatattcccgtgaactaaagcgatatattttcttttaacagatttatccattaattgttctacaagcccacgatgagcaatatcatttttagcaaccattaataaaccagaagtatccatatctatacggtgaacaatacctggacgaatttctccattaatacctgacaaatttttaatttgatacattaaaccattaactaatgtattggtataatgccctggtgatggatgaactaccatgcctttcggtttatatacaactgcaacatcgtcatcttcataataaatatctaaatttaaattttcaggtagaatatcagcttcaaccacttctttttcagtgacaactatatgatcattaagtttcactttataattagatttaacaactttatcgtttgcaacgactaaacctgctttaatccaatcttgtatctggttacgagaccaatcattatttaattcaggcagcaacttatctacacgcatacctgtttgttctttatctgtaatgttaaattcataagtctccattacttaacctccttctcctttttattggaagtatcctttaataaggcaataataattaatattacaccaattgttaaacttgaatctgcgatattaaatattggaaaatcataaccaaaaatatttgtatcaataaagtcaacaacttctcctgttaaaattctatcaataaagtttccaagtgcacctgcaaaaagtaaactaatagcaacttgcataaacaaattatattgagcatctttaataaagaaatatactaaggctattaatataataatggtaataataaagaaaaatgtcatttttccactcaatattccccatgcagcaccattatttcgatgtgatgttatgtttaaaaagtgcggtatcacttcaaatgaatctccaattttcattgtagtagctataatatatttagtaacttggtcaaatataacgacaaatactgctattaaaatggaagtgccaataaaatattttttgtgcattttcgttcctccaatcaatcgtccatgagacaactctttatattatagcttacacctgctaataaaaaaagtaagcatattacattaaatctaatgttactaactcaatacttgataaactactatgttttgacattaaatatgaacttaattattcatttatcatatttaagatgacattaaaaattaggaaagcagactggaacataaatccctaaaaagacagtagtaagatattttctaattaaaaattatcttactgctgttctctatttatacaatacttcgtattgaatggcttcgctatgcccatctggcacattactgtaaaattctataaatagaatttttgatgatgggtcccttcctagggtgccgtctcagcctcggtcttcgactggcactgctccctcaggagtctcgccattaatactacgtattaacatgtaattttacttttaaatactttaaaaaaataagacatgaatcgtctacacttaattggacaaattctatgagaatagatattgttaatttaagaaagtaggctattttgagtttcactcgaatgtcagttcgaggaataaataaagttaaacgagagctaggttttgtattaatggcaattaatataaggaaaatagcagctcaacgagctgtacattataaaatacatatcaaaaaagctgatttctatcaaataattaatagaaatcagctttttacattgcctaagaacttaatgtcccagcctccttcataacttgtataaaaagatcattaaaaacgattcattatatggttcgtccattcaaagtatatactaatcttcaacttcgatatgattaaagcgataatagataccatccggaccttgtaaatttaaatgtgttgtttcaggataatgaaagtcaacaattgctaatccatacgtatcaaaattttctacacgtttcgttgctgatacccaatcattcatggccaaatgttgataatagccattcgatgctaaaaatattgaataatcatccatatatgccgattgctctaatccaaaataatcgaggtagtactcttttacctctgataaatgaattgtcttaatatgcaatgcacctataatagcgtcatctggaatacctaaccataacaattttgttgcatgactcactaatctcggtacatttaatggtctaatatcaatttttactaaattattttgcctcgtccattgcgcttcgtctttatcaacataaaatttaaaaccgtttccttccgggtcttcaaaaaataatgataacgaagcaggctgtatacctccgttaactggaatatcatattcgcttaaatgaattagtaaattagctaaatcactaatttgaggtagtttaattgcgatatgaaacagtcccgcttcggacattaaaggttcacgtccattttgtaattcaacaagtgtaatgacatgattattttgacctacttcatattgtatcgatgttaatgtctcatttataatatttaatcctaatatgtcctcataaaatggctttaattcattcttatctctcacatttaaagtgataccattgacaaagtttgcgttactgttatgatacattcaattaactcctatcaaattcaatatctgtgcttacttttacttaaaattatcgcgaacataattgagaatagcaactataacgcatttatatgcctcagagaatttgtaccattcctgaataatttttattttagtaaatcgcacattttttacatatatgaccggtaacttggtcatttttttattcacaaaaaaactctcttcatcatgtcaacaaaaactacaacatgattatgaagagagctttaatttatatcatctgtatgagtactttatacaatttcaattatacaagtgattttacaacttgttggcatcgtggacatagatgcgtcaattcatcaacagcaccaagatcctctgaatagttccaacatctttcacatttttcaccatctgcatgttcgatgacaatatcaccatgttcataagctgttgcctgatcgtctaacttatctacaactttaacttgtgacacgataaataattgatgtaatgcatcaaatgaagttaagaattcagatgcattaaatttatcgttactagcaatcgtaactttagcttctaatgatttaccaataactttttcattacgagcagtttctaatgcacggttcacatcatcacgtaaattcataaatgtacgccatttatccaataaagcttgatctacttctacaactttaggcatgtctgctaagtgaacactttcttctttaacatgtggtgtatgagaccaaacttcttcagctgtatgcactaagattggtgctaacaacttcgtcatatcaactaaaatttgatataacactgtttgcatactacgacggatatgagaatcacgttgttcaatatataaaatatctttaccgtaatccaaatagaaattacttaactcaacattgataaagttttgaacttcttgataaatatttaagtagtcaaagttttcatagttgttaatcgtacttgcagtaaattcacgtaaacgatttagcaagtaacgatccacttctaataactctgattcaggaatgctatctgtgtcaggattgaaatcgttaatgttacctaacataaatcttaatgtatttctgattttacgataaacatcagatgtttgttttaaaatttcatcagaaattctaacatcagctaaatagtccgtactacttacccaaagtctcgcaatatcagcacctttttgtttaaccacttggtcaggtacaatcacattacctaaagatttactcattttcttaccttcaccgtccataacaaaaccatgagaaagtaagaatttataaggtgatactcctcttgtagcaactgaagttgtgatagaagagttgaaccaaccacgatattggtcactaccttctaaatacatatccgctgggaaacttaattccggtcttgtttccaacacgccacggtgtgatgaaccagaatcaaaccaaacgtccataatgtctgtttctttagtaaatgtaccgttagggctgcctggatgtgtaaatccttctggtagtaagtctttcgcttctctttcaaaccaaatatttgaaccgtgttctgcaaataaatcagcaacatgattcactgtttctttcgtcatgataatttcgccattttcagcataaaatactggtaacggtacaccccacacacgttgacgagaaataacccattcgccacggtcacgaaccatattgtaaatacgtgttttaccccaatttactttgaagtttgtattttcgattgcatctaaaatatcttgtcttactttactgattgaggcaaaccattgtggtgtagcacggaagattacaggtttttttgttctccagtcgtgtggatagctatgtgtaataaagtctaattttaatagtgcacctttttctgttaataaatcagtaacggctttattagctttatcatagaacatcccttcaaattggccgccttcttcagtaaatacacctttatcatcgattggactaattactggcaattcatatttttgaccaacaatatagtcatcttccccgtgacctggtgctgtatgtacacaacctgtaccagcatctgtagtaacatgatcaccattaatcactaacgattctctgtctaagaatggatgttgtgctacaacatactctaattctttacctgtgtattctttttctaatttgattgatgctttatcccaatccagtgcttctgctacagcgtcagacaaggcttctgcaataatatatttttcgccatttacattgtattgaccatattttaattcaggatgaacggtaatcgcaacatttgatggaattgtccatggcgttgttgtccagataataaatttagcatctgcatcaacgacacctttgtcatctttaacgtcaaatgcaacgtaaattgatgctgaacgtttatcgtgatattcaatttctgcttctgctaatgaagactcacttgaaggagaccaataaactggctttttacctttataaattaaacctttatctgccatttctccaaaaatacgaatttgtgcagcttcgtattcaggttttaatgtaatatatggatcattaaagtcaccacgaacacctaaacgtctaaaatcttttttctgtaattcaatttgttctaaagcaaattctttacatttctcacggaattcagctgttgacattttctttcggtcaacaccttttttcgttaatgcttgttcaattggtaaaccatgtgtatcccaacctggtacgtatggtgcatagaacccttgcatagttttataacgtacaataaagtcttttaaaattttgttcaaggcatgtcccatatgtaagttaccattcgcgtatggtgggccatcatgtaaaatgaatgtttcgttacctttatttttttctaacgctttatggtattgatcttctgcatcccatttttcttgaatttgcggttccttgtttggtaaaccacctcgcattgggaaatctgttttaggcattaataacgtttctttgtaatccatttttttcactccttaaaaatttaaaaaactctaagttaaattaaaagggacgattgctcgcggtaccacccttattaactcaacttagagttctctcattacattatttaaatattaaaaagccagtgatataacatacatgcttttactaggctctcaccattacctaattcgctgtgaaaagttaaatgtatattacgcgtctgtctttatttaattcttacttcttagttgtttctgaatcattggattgttgattattgtctggtgtatttgatgcattattttgtgcatttgctgcaacttcatctggctttaaatcattttcatgcaaatgatgaatattttcaagcgtcacttgttcagcgtctaaatcataattcaacaagtaatcccaatcttcgttttttaataagtctaattgcgcttcaactaacatacggaaacgcgatctaaatacttttgattgacgtttcatatcttcagtctggaatgctaaacggcgtgctttttctaccgcgtcaccaaccatttgattagcttgcgcttctgccttagctataatcgcttcagcttgtttctctgcagcttgcttagtttcttcaccagctttttgagcttgtatcaaagcatcacttacagattgatgcacgtcttgataagacttaatattagtatctctctcttcgattactttttcaagttgttttttatcttctttaagacgttcaatttcagtgcttagttgctccaaaaaattagcaacttcagtaggttctaaaccattctttacacgtgaaaactctttattcttaatttcatttggtgtaaaaggcatttgttatcctccttaaatcattactatttgaataatgttctataggtaatgtgcgttttatcttttttagttttaccacctaagtcagtaatgtgtgctctaccaaaaccttggatggatattaaatcatttgcttgtaattgaaaatctgctgaatcaacaatagtgtgattcactttaacacgttttttttcgattagttgtttcgcaatcgtacgtgatttacgtatcatttctttaataacaacatctaaccttaaagaactaactgttgcactttcatttttccaattctcattagattgtatcatatctgttactggaatagtataaagtttaactgatgcgcctttaatacgttgtaattctaacataataaatgattccaatctacttgtcaaaacaaattgaattcgttcattcacaattatatctccaacttgttcgcgttcgatacctaaagacattaatgtccctaaaatatgttgatgttttaaagtgacgaatttttcaggataatctatttccattaaagttaattcaaagtcgctttctttaggttcataatagttcggcgaaatgattgctctttttctttcagcattaggtccaccataaaaagatacgtttaaatcttcataactgccacaaatcacttccaatatatattgccctcttggatctaaaaaatgcgttaatactggtgcataatgctgttccgcttgatcacatttatccgttagctgatcaattaattcgtattcttcctgtctaaagtgttgataaatatctatgttaatcactaccttaaaaaaattataaaataccatctattgcccttatattcagaaaaatacatatcaaaaacgaggctaaagtatcatgtacccttgcctcgttatgtcgcttaatttattgtaattgaattaaaatccaattaaagatttggagtaaccctttttggaataatactaaaacgataattgcagcgattgatgatatgtcgataattccaataggtggaattacttttctaaatggttgtaagaaaggttcatatattttcgctaaaaaataacctaccttagtttctctaatacttggtacccaagatgtaaagaaatatataatcatgccgaaataataaatttcaacaacaaaaaggatgaatttaaatattgtagctagcacatttatatccatatgttaactccttagtcgaatgaatgttccatattttcaatatggtctgtaatgcttccagctacttccacattatcaggcgtacataagaaaatatcagtacctacacgttggatatctccaccgattgcataaacagtaccgcttaaaaaatcaataattcttttcgctgatactttatcaatacgttgtaaattgacaagtgtcgcacggcggtttttaagctcatcagcaatatcttgtgtatctgaaaaaacacgtggttcgaataaacacatttttgaactttcttgtgatgcattgtttggtgtagcattgttcatagttacaacattacgtgaattattttttgaataattagacatacggttattcctttcttctgacgttgttgtatatcttgatgcagatttttgagggactgatttgattgcgttttgttttgttgtttgttgtgactgctcttttgctggcgcttcatttacctgttgttgtttgtcaggtacttctacttcctcttcatcatctattacaaaaaatccactaaataaatcttttaaagccaagtggctcactcctcttctcctacaagtttagtcccaattctaacaaacgtcgcaccttcttcaactgcaataagatagtcattactcattcccattgataattcatcacaaggcgcatattctaaattgagtcgttgtatttcttcttttttcaaacgtaactgtttaaataacgatctaatatatgcttcatcatctgtcaatggtgccatcgtcattaaacctacaatttcgattttgtcatattttttaagatcatctataaactgatcaacatcttctaaagcaataccatgtttagaagcttctcccgaaacgttcacttgcaagaaacatttaattttatgttctgcacgtttgttaatttctttggctaagctcaatcgatctaaagcatggaaataatctacgtcgtttataacgtccttaacttttcgagattgtaatgatcctataaaatggatcaccgcatctgatggtaatgcttctttcttttgaaaaaagccttccaatctattctcaccaaaatgtcttattccagcctcatacgcttctttagctcgctctattgtaacatattttgtaactgcaatcacgtttggttttgttgaaaaattatttttttcacttttgtcattaatttgtgttgagatttgttgtaaattatctttcacacgcaaacatatctcctccttgtttactgttgaccaatgaatgctaacatgcgtcctgtttgacctttttctaatcgataagagaaaaataattctaaatgttcagatgtagcatacgctgtcgtataaatattttctttaggaacaccataataaattaataatgcagcattggcttttttcaaatcaataccatgacgatctcgtcctctagtttcaatatagttggcactatcaattggcaatgtttcaaatttatttttaatatcatcattaatttcataacttgatgatgtagatggtccaataacgacatgtaagtctttcaaatcaaagttcacatgttttagcacttcttttacaatttcagtataggtaccacgccaacctgcatgcgccaatgcaataaaatgatgttttgtactataaaaatatactggtacacagtctgcataacacatcgttaataagacattactatcatatgtgtacatcgcatcaataccatgaagcgcatcagttaaagtgtctatatttgtgcctatatcatcctttgtaatacaagcgactttattttcatgtgtttgaatgggaaacacccaattttttctatcaaacgcaatttcttcagctaattgcaattgatgttgagtaatattatatgggcgatcatcaatatatctcgccatattaaaagcatttttaggatagtcacttaaaccatctcctctagttgtaatacctagagtaataccttgttgtaataactcttcatatattaaatgatgcggttgctttttaaaattatcattcactcgatcgtcaccatcatttcatttaaattatcttcgtctaactgtacaaagttaataattatataatataacatttatgtttaaagttaaaatgttgcgcaaataatttttgacttaattttcacacgatacttaaacacttttaataactttgaaaaacttaaatgtccttctacatgttctaaaaattagtaaaaaaatcatcagatatgttatctgatgatttgtgttgaattatttgtgtatatatattaaccgattaacgtcttgttcttcttgaacgtctttcttctctatttctaatgaagctaggaatatcatcttctttagttgtatgtgttctttcacttacactatcagttgcttgtgcatttgatgaatttgaagtgaatgattcatctttagaagttgcattgctagaagtatttacgcttgttccgaatccagtgctaccagatttacgaccatgtgatgttggtttgtcatcaaaaccagttgcaataactgttacaacaatctcatcttgtaattcaggattaataactgtaccgaaaatcatattaacgtcttcatctgcagcatcttggacaatatcagcagcctcttgtgcttcaaataatgacaatgactcgccaccagtaatattcataagcacaccttgtgcaccaacgatagatgtttcaagtaatggagaagagattgcttttttagcagcttctaccgctctattttcaccagaagaaacaccaatacccattaatgcagaaccttggttagacataattgtcttaacgtctgcaaagtctaagtttacttcaccagaaacagcgattaagtctgagataccttgtacaccttggcgtaacacgttgtcagcttctttaaatgcttccatcattggcgtagatttgtcaacgatatctaataaacggtcatttggtataacgattaatgtatctactgcagctttcatagcttctactccagcagcagcttgagtttgacgtttacgtccttcaaaactaaatggacgagttacaacaccaacagttaatgcgcccatttcttttgcaattttagcaacgactggtgctgcaccagtaccagttccgccacccataccagaagtaacaaataccatgtctgcaccttggattgcatcttcaatttgttcacgagattcctctgcagcttttttaccgatttcaggattagctcctgctcctaaaccacgtgttaatttttcaccgatttggattttagattcagctttagataagtttaaagcttgaccgtctgtgttgatagcgataaattcaacattattcattccgtggtcaatcattcggtttacggcgttgttaccgccaccacctacaccaatgacctttaaagtcgctaaatgattaaatccttgttcaaattctaacatttaaatttcctcctagttttattggccaataatcattcaaatagagatttcattagttttttgaatttactttcttctttatctttatctttgtcttgaacatgttcatgattctgtttatgttcctgatgattatcttctgattgataaatttcttcatctgttgactctacttcattttcatgagtatcttttttgtttgttttacgtttaaaccaatcaaatccgcctaatttagattcgttatctttgtctttcacatcaataacatcttcttcagtttcttcattatcatgataattaattgtaacataatctaataactcatcaaaagcgatactactagaaattgtagaaattgctgaagaaaattcaggttttctaattcccatttgtgatggcgtgtgaattctaactttttcacttaccatatctgataataattcttttacgccaagtaagtttgcagatccaccagttacaataaacccaccatttacttttgttaatcctaaatcttgtaaaacatcaaatacttcgaagaatatttcttctacacgcgcttcaataaagtcactcaaatctttttgagtatactgtactgtttcatcactatcaacctgttcaacagtgaagatatcttgatctgaagcagaatcatagaatgcatgaccatattggtgtttaactttttcagcagtttcataagaagtgtttaatccttgtgcaatatcgtctgtaatatcacgccctgccatttcgatagaatcagcatctactaattcaccgcgttcataaaaagcaacttgcgtaacgtcttcaccaatatcaatgacacatgcacctaactctttttcagtagctgttaggattgaaccatagttatatgcatcagagtaaacatctaatacatcaacaccacatgcttctacgcatttaatcatattaattaaaatcgatttttgaatagcaattacgcctgcttcaacctttaatgaatgtctggcaattaattctttagggtctgaaacctcattttctttatcgactataaaacgaatcgggaacacattaattacttctgtttcttgcacatcatttttttctctaataccttctaatactttttcgatatgtgaaccgttgatttctgtatcctcataaaagtcgatttcatttgattcatcataaacttccgttccaatgataggtaatttcaggaaaacttctttaatatcaacacccgaagcgattgatgcctttttaattgtgtctttgattgcttgtcgcgcaatatcaaaatcatcaattaaaccattttttataccgctcgtgtaggtttgtcctgtacctatcacatttataccattgtgaaatttctcgcctactattgtttttacgcttgatgatccaatatcaatacttacgtagtaatgttcttccatagataggcacctcctgacaaattactattaaaaaaatacactatccttagtttacaatacgttgaatggcttgtgaactataaacatagacaatatcaaaattttttaattattcttacttgattgtttgttaattttgtttaaaacgctttgtaattcttcttttgcttgattttcctcttgagatgatttagtcacatttttatcgctttctgattgactagacgtgtttccacggtatgggataaatgaagcaccgactgataaatcaatatagcctcgtgtttttagtttacccgaactatcccttgataatgattgtgacatctgcggataatatttcattttcttagatatcgtcgaaatatcaccgattacttgaagtccatctgtcgtaaacaattcaattctgctttgtttgtttttacttggggcgtatgtcacttcggcaatatatcgtctaacttcaggtgtcatttcagataacgccttaatcatatcatcttcttttgtacctttgaaaccatccatgacaggtgcatcattaattttgacatcatttgaacctttaagcaatttaccattttctaataaaggtaaatatttacctttatatttcactaaagcaataatttcattttctgtgatatctacgtttaatgtgtttggtaattgcttgtgtatctcaacacttttgattaatggattctcttcgagatcattaatagcattttttttactaaacgtatacatccttgaatcatttttaacacctaaaactttgtttatctttgaagtactaacgtgattatttccatttatatttacatgcgcaattttactaagtggtgaaaacatgtaaattaatataacagcaatcaacaataccaatattgtaataacactgtattggattcgcttttgtcgcttacgtcttaacttccgcttttcttcaagtgttaatggctttaattgtgttactttactttttcgttcttttttcgttactgtttcctcatcaatcgagtcgctattttgttctttaggagctgattgaggttgttcgttgtcgactgaaattacattcgattcattttggtcgtcaatttcttgattatatctataatcctcattttcaatattagagtctgtagaatcatcgatattattatcattcgcatgactagaagcagaatcattatttttatcattgctttcttcttttttgaagtctttatttatcaagtaaatttcttcatcaaaatcagcttgttgagatgtatcatctttattttgattagaaaaatgtgtagcctttgatctttttctttgccgtcttttcttagatgtattcctcgtaaataattctaattcatctttatcttcatttgattcttgttgatcgttcttcgttttatcatccatcaatactcacaccctttaataagatggtaaatgggcacggaatctttcaataaatttctctccacgctcttcaaaagtactatattgatcccaactcgcacaagcaggtgacaataatacaacatcatttggttctataatatcttgtactttatcaacagcgtcttcgacattgttcgcttcaatgaccgatttcccttgactattacctagtttagcaaacttagctttcgtttgtccgaatacaaccatcgcgcgaacattttccatataaggaatgagttcgtcaaattcattccctcgatccaaaccaccacataaccaaatgattggttgattaaatgaatttaaggcaaactgtgttgctagcgtgtttgttgctttggaatcattataatatttattagttctattagtaccaacatattgcaatctatgctctattcctgaaaatgtagttaaactatcaataattgctttaataggtacaccagctaaaatacaagcaagcacagctgctaatatattttctaaattatgttcaccaggcaatactagatcttcagtgttaataatacgaacacctttataaacgataaaaccatctttaatataaataccatcaacttcttgttgagttgagaaatacaatgtcttagcttttaattcttccgactctatcacttgtctttgatgataattacaaatcaaataatcctcttccgtttgatttttatatatttgctttttagcattttgatagttttctaaattttcatggtaatctagatgcgccgaataaatgttagtaattatagcaatgtgtggtttatacttttcgattccaagtaactggaatgacgacaactctgtaactaaataatctgtaggctttacttcttgtgctactttagatgcaacataaccaatattgccggataatcttccagttaagcgactttttttaaacatatctccaattagagaagtaactgtcgttttaccatttgtacccgttacagctatgattggtgcttcagagattagataacttaactcaacttctgttaaaattttcaaacctcgtttcactgcttcatcaataatagatactgtataaggtattccaggatttttaacaattattggattattatcaagcaacgttaatggatgacttccacttacaacagaaatgcccatagattctaaatcttttgcatgagcatcttgtgataagtcttttccatcattgacagttacattcgcacctaatttacttaataatttagctgcttcataaccactttttgccaaaccgacaactaatacatttttattttctaaccctgtataattaagcatcttaatgcactccaatccataaaccgattaaacctgaaatcagaccaacagcccaaaatactgtaactactttccattcgctccatcctatcaattcaaaatgatgatgaatcggactcattttaaatatacgctttccagtcaatttaaagctagcgacttgtaacataacagataatgtttcaattacgaatactaaacctataaaaattaatgataattcctgattaagcatgattgaaatggtagcaaatataccacctaaagctaagctacctgtatctcccataaacactttagcagggttaatgttatatggtaaaaatcctaaaagtgcaaacaacataatgatacagaaaataccaattgccgtttctcctaacacaaagctcatgatggcatacattgtaaatccgataattgacagtccagttgctaatccatctaaaccatctgttaaatttactgcattagaaaaacctacttgccaaaaaacaatgaaaataacatatgcaaatgatagtgggattgctacattcgtaaatggaatatgtatgctcgtagaaaaattcaccaaatgaaacacattacttaaaacaaagaatataatcgcaataccaatttgcgccaaaaacttctgtttacttgttaaaccttggttattctttttaacaacaataatataatcatctataaaaccaattaacccaaaaccaatcgtcacaaataataacagtatgattggattagcttgatctacaaatataatagccaccaaagacgttatcacaatacttaatagaaatgttagtccacccatcgttggtgtaccagtcttcttcatatggctttgtggaccttcttctcgaatactttgaccaaatttcatcctttttaatgtaggtattaaaacaggtaccaaaacaaatgtaatcactagcgctaataacgcatatacaaaaatcataactatctcctcttcttaatccagacttttttaaccactaatatattatcaatttttcaattaaataaacaaagttgtaatcaaaatttataatttttcttttttacggcataagaggacagtataaaaagtttgcctataacaaacaagttaatctgacctcgtctaccttaaaattctctatcaacacttatttataaagattaaatgaagatgttgttttctatcacagcattactttagtaaaaacaaatagtgacaatacatcctaatttaatgtagccattcttgttagtccgacttatccttgtcagttttactgtcagatttcttcttatcatctgaatttgaatcagaattattcgtcgaattgctgtctacattctctgatgaaaattctacgtctattttatctttttcagtaagtttttgtcccttactaattgattggtgggacacaaaaccgctaccttttaaatttactttaatatttgttaggttttcaaaagcaatgacatcttctttcgtccatcctgacatgtcaggcatagttaagtctccatctgttaataacagtactttactatgaggtaagactttattccctgcttttatagattgtgcttttatttgtgtgccagaaccaatagtaactggttctaatgattttgcactcacattatcaatagctttttgtttgtcttgaccttcaacatctggcactttactatactctgcattagatgtgtcatcttttgatttacctacatttaaatatttcaaagtattttccattattggtttaaacgctttactaacacctaattcataagcttcttggtcatttttttgtgccaagctcataccagcgtatacaataactttaggatttttcttcggcgcgtcacccataaaacttacaaaatatgggtttggacctttaacgtatccaccaccattaggtgcagcgacttgtgctgtaccagtcttaccttcgacctcataaccatcaatacgatagtttgcagcgtgactcttcttactattcacaactaaatccaattgcttttcaactttttcagcagtatcttttgttattggtttgcctgcgatttgtttttgccctttataaaattgtcttttactaacaggattttcaacgctattcacaaaccatggttttaacatattaccatcattaaagaacgctgattgcgcttgtaacatttgaacaggtgttactgttgtcgattgaccaaatgatgacgttttttgttgcaactcattactccatccaatttgaccaggtgcttctccatcaaacatacctttagttgattttccaaatccaaatcgttcataccaagatttcattttgtctgcaccaactaaatcttgtaaatgcatcatcaatgtattagatgaataagtaaatccgagtgacattgggatttcaccccaaccgactctattccagtctgaaatacgtgaacccataatatctctatgtccagatttatatttcttatcaggatcaaaagcaccttcttgaatagcagctgctaacccatatgatttaaatgttgatccaggctcgtatgtgttttgataaaggtcatttgcccactttttaccaaagtctttaccagtttcaggattaaatgttggtcgctgactgtatgctaaaatttctccagttttggcatccatgacaaccgcaaataaatctttcggctggtatctttcaaccatgccatctaaagcttcttcaacaaatacttgaatatttgaatcgattgttaaatggacatcatcaccacgtttaggctgcttctcttttttagtatttggtgcgatatatccccaaatatcatgaatatatctcaatgatcctttagatccacttaaataactatcaaaaatcttttcaactccaagtgcacctttaagttcaccagtatccggatttttctgagctctaccaattaagtgtgatgcaaaattgccatttggataaaagcgttctgtttcaggcaataaagaaataccaggcaaattcattttctctattttcaatttgtcctgatacgttaaatttgttcctttgcgtccaaattcaatttggaaagctttcttttgactaagtctcttttcaatttcctctggcttcatattaatgactgtagataatttctttgcagtctcttttttatcaactacatgcctaggttttttagaattggcactcgcctttttatctattactgcaacaagtttatatctttctacatcttctgctagcactttaccattacgatcatatatctttcctcgttctggttgttgtgcattcttaactaaatacttttcatttgccttcatgactaaatcttgaccattagaatgtccagtaatcatgatatatgaaattcttaaaaccaatataaaaaagagcagtccgaataaaccaacaagtaggactgcccctattttattttttttaattttaattttttgcttcgccattactacgcactacctttacattatcgttctcaaggctcatcccctgtttcttagccttttcgtatatgcgttcataagaagaattctttttgatttcagattgtaaagcactgttttcacttgattgtttatctattttataatctaaatctgcaatctttcctcgcgtatcatacgcatccatttttaaagatagcatataaatacttaacatagcaattacagtaatcaaagttatgtataaaactttttcaaatttagttaattgtacaaccacttttctcgaaacagtcttcttttcgggcttagtttgtggttgttgcttcggtatactattataaacttgttcgtcatatggttggtacactttttctacagccattataaattgctccttatttaagtatttcagctacacgtaatttcgcgcttcgtgctctgttattgtcatctaaatcttcttctgtagcggtaatcggtttacgattaacacgctttaacttaggtgtatatgcttctggtataactggtaatcctcttggtacctctggacctttttcatattcttggaacacctgtttacataaacgatcttctaaagaatggaaagtgattaccgaaatcctgccatctactttcactaattcaatcgcttgttctattgaatcttcaaaagctgacaattcatcgtttactgcaattcgtagtgcttgaaatactcgttttgcaggatgtccgccttttcttcttgcttttgcaggaataccttcttttataatgtcaactaattctaatgttgttgttattggttgttgttcgcgatgtgcttcgattcttcgagctatctgttttgaaaatttctcctcgccatagcgataaaaaatcttcactaacgcttcatatgaccaattgttaacaatttcatatgctgttagttcttgtgtttggtccatacgcatgtctaatgttgcgtcatggtgataactgaatcctcgttctggaatgtcgagttgtgggcttgaaacacccaagtcgtaataaattccatctactttttcaatgtttaagtcttttaatatttgagttaattcacggaagttgctatgaacaaaagtcaccttatgcaaatgatcctttaatacctctttagcattatcaattgcagtttggtcttgatcgattgctattaatcttccgtcgtcatttaattgatttagtaaataaagggcatgtcccgctccacctagcgtacagtcaatgtacacaccattttcttttacatttaaataatcaatggtttcgtttaacataacgctgatatgatgaaacacttcaattcctccattttaaaaatcaaaatctattaaatcttcagcaatatcttcgaaactttcttcagattcttcatagaaatcattccaagtttctctatcccaaatctcaatacgatttgaaacaccgattactgtacattctttagttaaattagcgtatttcctcaagttttgagggatgttaatacgcccttgcttatcaagttctacttcaacagcaccagagaagaacatacgcataaacttacgtgcgtctttttttgtcataggtaaggttttcattttctcttcaatctgttgccattcgtctagagtgtaaccgaataaacatttatcaaggcctcttgtgataataaaacgctcatttaagtcataacgaaacttggacggtataatcatacgtccttttgtatctaattgatgatcgtattctcccatgaacattttttatcacctcaccttatatataatttaccacatctccccactatccaccactatttatacaaaatttgtgaaatttattttaaaaaacaaaaaaatgcccgatttatcattaagataaatcgggctaaacccttggtatattaaggttttataataatatgatcaaaagtgtaagaaagtggtggataggtggagggcttgaacacatctgtcccaaaatcattcaaaatttgaagtggattccatattctttcttgtaatcctcccattggatggagtgtttcttgaatttctctaaattgcttcatactgatgtcgttttctctttcaatgtttaaaagataacgttttaacaaataatcatactgttgtatatgaatttcattatttttattcacaaggttaatattattttgattccccgccacttcatctaataagtctttgtttagacgacgctgttgttcaatcataccttctaccttttcaataaattgatgtgatgcttgttctctaataaacttacttctttctccttcaacaccatcgactaacactttttctaatggaatattgtatttcgaaagtaatttttctatacggtcatttaaataagtaattctaagccttggcatcacgataggcatttcaacatcaaatagttcaaatacatcttttagttcagcccagtacttaatttcactcggtcctccaacaaatgccaccgtgttaaataaccattcttccattaatggtcttgtcactacattattagaaaataattcaggttgattttccgcaatatttataatttcttcctttatatatgtcttatctgttttatttaatttaaaatgcttaccatcatacgaaactaattgacgcatattttcatcatgtaagaataaatgaacatttgtatctgtttgtatcatcgcattcaagccttgattttgagtacgttgttgtgttgctctaaaagcatcatcaagcaactgatgttttttcaaaatctttttaaacataggcgcttccatttttcttaacggctcaaactgcgcatctataaatagaacgccatatgctttaaatgtttcatgcagtagtgctttaaacatatcagtccacgagtcatattggtcaataattctgtcacaaatctccagtagaccttgtgtatgaacagtttctttcatatgaatgaacatcgtttttaaagtttgtttcaactcagccttatcaggataatatctagagacagtcgtctctggcatctccattgtatgatatttaaccttatgcagcgacccatgattttcgttataaacaaatgtatgattcacttcatcgaaatcatgatcttctcctgcaatccaaaaaactggtactacttgttgcttatgtgtatccgttaattccttagataaagtaatgattgaaaatattttatggaatgtatacaatggtcccccgaaaagccctgcttgttgtccaccaatcacaacttttgaaccattagctaaatgttgtatgtttaattcttgttcacttgaaagctttaaatcactcatatattcacgaataacattcgctaatgccgcttctcttccattattttctttagacatccttttttcaaaactagtttgttgagctgcatcatattgaaataatcctgttattacagggtcactgctctttatttttggtataaactgatctttttcatttaaactaactactttacagtccatgttttttctccttaagtacgcgattacaaactatagtataaagtctataccggtgattgacaattttacggcttgaaaatcaatttaatcatggaaaatttataatattcattgttttacattttcaaatcaatgaaaaacacaagtggtttaatgtataataatagtagtaaacaaataaggggtagataaatatgagtgaaatcaaacgtcttgaaattaattacaaaactgacgaattattcgaaaactttagagcgtttggcaacaaagacttatacatggtcaatgagttaaacggtcaaatgattgatgcaagttcagattcaccattttatggcatatttgtcggagatcaattaggagctagaatggcattactaaaaaaaggtgatgtcgaagaaatctacttcccagattttgaagattatatattattatggaagttagaagtattaccaaaatatcaaaacagagggtacgcttcagaattgattgattttgcaaagagtttcaatatgccaattaaagccattggcagaaatgattctaaggatttctttttacatcatggatttacagatgtggaagctaaaaatatagagggacatgatgtcttattgtggaaaccataagataataatattcgacactacgagcatgaaaatgcatcttttcgtagtgtcttttttacaattactttcttaagctaatataagtaaatcattttcaaattatttgtcttaacgtacaatatcatttagttgtttccatgaattaatttcataatcaggtataattcctggattatgatcaaatcctctaaaattaaaccagcaagtagctatacccgcattgattccacctagaatgtcagatgttaaagaatctccaactataatcgagtgctgtctttcatcctcaccaatatcattaaaaacataattaaaaaattccggattaggtttttgatatcctgtttcttcagatataaatatctttttaatatatttatgcaacggcgtctgatttaaccttctcttttgcgtttcggttacaccattagtaacaatatataaatcatgtcttttcgataattcgacaattgtttctaatgtttgatcaaagtatttaactttagcttctgctaatccatttctaaataacacatctgcacgatgcccatcaacttccatttgatgatgtttgaagtaattcacaaatcgttctgataatacttcagacttcgttaatttattttgttgaaaagcttcccaatgttggtgattgatttttttaaatgttaaaaaatcatcctttgttgctttatgattaaaaacattcgccatatagtgaaacgcccattcttctgcatcataaaaatcaacaattgtatcatcaaagtctatcaaaatatttttatatcccaatttccccatctcctatattgtctatgtatctaaatcttaacagaggctcaaatttctgcaaataaaataaactgagtgcataacattaaagtatgctcacccagtttattttaaagaatattagttattatattagaatccaaataatttacctagtaaacccacaccgttagcaacgatgtctacgatacttgtgcctaatttcacactatcatgttgttgtgcagcttgcacagtatttgcgattgcttctgctagtccagtcatttaaatctctccctcacctttgaaataatactgattacttacataacatattgaaattagaatccgaataatttacctaataaacctacgccattttcaacgatgctcacaatgcttgtgcctaattttgcgccatcattattaattgctgcagttacggtatctttaattgcgttaaataaaccttccattgaaaacactccttaaaatttaaatttgaagataacaaaaacgtgcgtagcttttaaatcaccgaaatgttattcgcttatcgttttgttgttgttattttaaaataaatttgatacaattagtttgtttatccgcacaacatcttataatgtacttaactgtattttaaagagaaaagaaatacagttaggcattcaaaactgtatttaacacaattaagttgcctgaattcgtatttaagtcttattgaacctttttagataaatagctctataatagtgaaaaatataaacattttttatttacaaggtattgctaatttaagttcatttagatataataattcttgtgttgttaaacgtgtcctggtagctcagctggatagagcaatggccttctaagccatcggtcgggggttcgaatccctcccaggacgtttataggtatttttatacgcattaccaaacaaaagagttctgtgattacggggctctttttgttttgaatttcagtaatatagtatgatgcgtcaccaaaacgtcccccgcataagccccgaaaatacagtaattaaaacaagcatgcttattcgttatagaattttttgacacacaattgacacgcgtctgacacttgtttatacatttttaattaagtaattttgtgctcaaatttcatctatactgcacctgaactacaccaacactacaccaagatttttaacactcaccatttgcatgcgtagagatttttattattatattattcctatagattttgatactattcaaaattttagggacttttcaggggcccgaaatcctataattataattatatacatctaaaaaaaataaccacgtccatcgagacgtggttttttaattatttaactcactaattattcttcttaattttcattgctaaatatactattggcaaatttataaagtagttcagcgtttttcaatgacatattgtctaatgatctttcattttttctcattctgtgtattgtgctttgtggaactcctgtttgtttcgatatatgtaaactgctcaaatcactgtctaatagtttttgaatttgatttctcattttgtacacccccttgtaaatcttcaatcatcatttaaattaaataattacttttccacatattccaatatttaggttgcaaagcatacctcaaatatcattaattttgagatttaaatgtcaattatgtgtctatcaatccaatatacatactctaataacgtaatagtacacactcttcttattaattggccatagctatcatgatataattagtgaagaaaatcacataagaaaggttgtaaatcatgagacttcaaaaagcacctctagtaacgtcaggactagtcttaggattattaggcctgggtaatctattaaaagacttatctcttactttaaacgctgtttgcggaatctttgctttcttgatttggattcaccttttatgtactatgatcaaatattttaataatgtgaaagaacaattaaacagtcctctagtttcatcagtgttcacaacatttttcatgtctggctttttaggtactacttatttaaatacattttttagtaacataacttttatcaatagcttaataacgcctatttggattttatgccttgtgggaattatgacgcatatgattattttttcaataaaatatttaaaagatttttcacttaaaaatgtttatccttcgtggactgtactttttattggtattgctatcgcaggattgacggcacccgttagcggatattttttcataggtcaattaacagtaatatatggctttgtagctacttgtattgtcttacctatagttttcaagcgattaaaagcatttccattgcagacgtcaatcaaaccgaacacatcgacaatttgtgcaccattttctttagtcgctgcagcatatgttatagcttttcctaaggcgaatgcttttatcgtaattatatttttactattagctcaaatattttatttttatatcattatacaattgcctaaattactaaaagaacctttttcgccagtattttcagctttcacattccctttagtaatctcagcaactgctttaaagaacagtttgcctgtacttatgtttccagacatttggaaaggtcttttgtttatcgaagtgttattagccactgtaatagtacttagagtctttataggatatcttcacttctttttaaaaaaggaaaaacaagataaatttcttcgtaatgcgtctcagtaacactattaccaagaattaacacgtatatttaataactaaaaagaggcaggtaatcttgcctctttttagtgtatatcaatgcctctttgatttaatatgatcttatcaatgataccttctgactaaagctatagtaactatactagaacgtctagttcataaacacgtttcactctaacctttatttaaataatatataagcagcaaacgccaaggctaatataccaataaaataattaataaagatttttattttagtctttgtaatagttgacaaattttatcacctctaaatatcgataaattaaacaccgttatttttcctttgcctatcttttatcatttcagaaggtactccgaaaataaacatcagaataaataatataattggcaaatgtggtatgttttctagcaaataccatcttaaattccaatcaaacaccatatttgcatacgccacaaaatatttactaaataataatactacgcatattccagttagtgtatctaaaacctttgtcaaatgtgtcatttatagccatcctttatatatgctattttcacaaccatatgtatcatgtgttacaaaaactgtttacagcaaatacatatttaccacgataaatataatataccatagatctaacattacattaaaaacaaattttaaaaatatcattattaaatagagcattgtatcaattacttactagtgttatcattaccgtcattattttcttaatcaaaaataataatgcacctcgcttagtttagtatttctacaaacctacgagatgcataaaaccccattagtattttttataatatagcatttcaaattatgaataaattagtacttgcgtaattagtactccgccaccgaaaatcaatacaaaagcaactaccggccatacaaatcggaaccaatgtgaatatcgcatgtttaacatttgtagtgtggccataacaagtccagtcggcgctaagaataacatcgcatattgaccaaattgatatgtcgtaacgatgacgaatcttggtatacctactgtatcagctagtggtgcaaagataggcattgataataccgctaagccagaagatgatggcacgataaaacctaaacagaagaaaataaatagtaatacgatgataaataatggtccactcatatgttgaactaaagatgatgaaaagtgtaagattgtatctgaaatcataccttcattcaacactaaattaatacctcgagctaaaccaataattaaagatacacctactaaacttgatgcaccattgacaaatgcatctacagttcctttttctcccaatccagatttacctgtcccagcaataaacattattataattgtaaatattaaaaatgctgaagccataactgggaaccaccaaccttgcgtcataactccccataccataattggaaatggtagtacaaataatgtaaggattatcttcttacgcaaagtaaaatgggcactatcgtcatcttttaatacagaccattgctgttcaaaagcatctttgtcttcataagaatatgacgctttaggatcgtttttaatttttttacagtaccaatataaataactaataacaaaaatcgcaccgacaatacaagcacctattctccaatacaagccatccgtaaaagttgtaccagcggcattagaggcaattacaaccgagaacgggttaatagttgaaaatgtactaccgacagagctggcaaggaatatgtcaccaactgaaacgatagaatcgtatcctaacgctataaatatagggactaaaatcggataaaatgctacagcttcttcttcaataccacataatgtcccgccgataatcattagtattgatacaaacacaattagcataaattcatgcccttttgttttcttcgttaaagctaacaatcccgattcaaaagaaccactggcttgaactacgccaataagtccccctagtacaagaatgaataccatgatatcgaccgcttctatcgtaccttcaaccatgctacttgttatttgttctggtccagctggatgttgctttaatctttcataagtattcggaattgataccggcttattaattgcacctgatttaaattgttcaatcttaattttaacccccattttgtctagttcctgttgcgtacccggaacctttttcacttggttatgagggttaactatctttagttcttgggatgaaggttcgtaagaaagtttagaatatgcaccagcaggaataacccatgttgctataactgcaacaaccgttaaaatgaataaaatcataaatgcacctggcatttttaatttaaatcgttttttcttttcactttcattaattgtattttccacggtttcatctccttcgacatttaacctagcatttctaccttaaagattttataaatataaattaagaaagtgcaccccgcatcaaaatagaggcattattttcagggggtgcacataaataataaaaatcatgcatttgacatatagtaattgaaaagcgtttcaattcaattactttttaatcacagtacctactttaccctctaaggcagcatctaattcatttaatgatgttataagcacacttccttttggattgttttcaataaatgatatggctgcttcaatttttggtaacatacttccttttgcaaattgattttcgtctatatatcgttttaattcatcaacatttgttgttttcaaaggctgttggttttcagtgttaaaattaatatatacataatcaattgctgttaaaataatcaattgatcgcattgaatattagcacccaacaacgcacttgttttatctttgtctataactgcatcaatacctttaaaaccatcatgttgctctctaattactggtatacctccaccaccagcagcaataacgagtgtatcatttttaataagtgttttaatactctctaattcaataatagagatgggttgtggtgaaggaacaacgcgtctatatcctcttccagcatcttcaacaaatataaatcctttttctttttgaatttgttcagcttcttctttgttgtaaaataacccaattggttttgaaggattgttaaatgccggatcattttcatcaacttcaacttgtgtcactagtgttaccacttgtttatccattccaatagaatgcaattcattttgtaagctttcttgtaattgatagccgatgtaagcttgactcattgcgccacattcagcaaatggaaatgccggaccttggttatgttctgcagcatagttaagtcccaaattaatgcttccaacctgtggtccattaccatgactaataacaatctcatgtccttttgttattaatcctactaatgatttcgcagtatttttaacaagctcgagttgttcttgaggtgattttcctaaagcattaccacctaatgctactactattttcgccatcatattcacttccttatatcatttaaaattcacccaatgtagcaaccatgactgctttgattgtatgcattctgttctcagcttcttggaatacaactgaagctttactttcgaatacttcatctgtaacttccatttctcgaataccatatttttcaaaaatttgttgacctattttcgtatcagcattatggaaagatggtaagcaatgctcaaaaataacatttggattaccagttttatccattatttctttatttacttgatatggtttcaataattcaagtcgttctttccatacttcatcaggttcacccattgatacccaaacatcagtgtaaattacatccgaaccttttacaccttggtcaatatcatctgtgattaatatgttgccaccattttcagcggcaatatttttacagcgatttaataattcatctgttggatttaattcttttggacaaactaaatggaagttcatacccataatggcagcaccttgcattaatgcatttgcaacgttattacgaccatctccaacatatgtaaagttaatatctgcataatctttttttaagacttcttttgctgttaagaaatcagcaagaacttgagtaggatgatcttcatcagttaaaccattccacactggtacgcctgaatactcagctaaagtttctactgttctttgtgaaaaaccacggtattcaatgccatcatacattccaccaagcacacgtgcagtatctttagttgtttcttttttacccatttgtgatccagttgggcctaaataagttacatttgcaccttgatcatgcgctgcaacttcaaatgcacatcgcgttcttgtagaatctttttcaaataacagtgcaatatttttattttttaacataggcttttcagtgccaatatatttagcacgttttaaatcctcggagagtgttaataagaattctacctcttgtcgtgaaaagtctaataaagttaaaaaacttctgtttcgtaaatttttcattaataacaactccttttattttagttacacctaaattgtaagcgcatacaaaataaacacaacctactattaaaatttgtaatattttatcaataattaaatgaacattttattaatattaaatttaagtagtaggaaataattaaaataagtactacatttaaagtataactatttttcaagtagttagaaaattcaattatcaaacaatttaatacaattgattagagaataattctaacgtatcgtttttaatatataactcccgcctactttattagatactgtttctgtccaaaacttaaaaatgataagttttgcttaaataacactactaactgtttaagtttatttaacatagttttagcttttatttaattccgaatcggtgtaatagcttatatactttgggtaattcacgcaaaggagattttcatatgaaaaagaacatcatgaataaattagttttatcaacagcattgttacttttagaaactacatcaacacaacttcctaaaacaccaatcagtttttcatctgaagcaaaagcctataatatcagtgaaaacgagactaatatcaatgaactaatcaaatattacactcagccgcatttttcattatctggaaaatggttatggcaaaagcccaatggtagcattcatgcaacattgcaaacgtgggtttggtatagtcatattcaagtgtttggatccgagagttggggaaacattaatcagttaagaaataaatacgttgatatatttggaactaaagatgaggacacagttgaaggttactggacttatgatgaaacatttactggtggtgttacgccagcagctacttcatctgataagccttatagactatttttaaaatatagtgataaacaacaaactatcatcggtggacatgaattttacaaaggaaataaaccagtattaactttaaaagaattagatttccgtattcgtcaaacattaataaaaaaataaaaagttatataacggagaatttaataaaggtcaaattaagataactgctgatggaaataattacacgattgatttaagtaaaaagttaaaattaactgacacaaaccgttatgttaaaaatcctcgtaatgcagaaattgaagtcatactcgaaaaatctaactaacctattaccttttgtaaatgcggataatttcaattatctaattaacccctttttataattaaacattccaacaatactcaaaggagaaattcgaatgaacaataacatcacgaaaaaaattattttatcaacaacattgttactattaggtacagcatctacacaatttcctaatacacctatcaattcttcatctgaagcgaaagcttattatataaatcaaaacgaaactaacgttaatgagttaactaaatattactcgcaaaaatatttaaccttctctaacagtacgttatggcaaaaagataacggtacgattcatgcaacgttgttacagttttcttggtatagtcatattcaagtttatggacctgaaagttggggcaatatcaaccaattaagaaataaaagcgttgatatttttggcataaaagaccaagaaaccattgattcttttgcattatctcaagaaacgtttactggtggtgttactcctgcagcaacatctaacgataaacactataaactgaatgtaacatataaagataaagcagaaacgtttactggcggatttccagtttatgaaggcaataagcctgttttaactttaaaagaattagattttcgtattcgtcaaacattaattaaaagtaaaaaattatataataattcttataataaaggacaaattaaaataacaggtgcagacaataactacacaatagatttaagtaaaaggttgccatcaactgatgcaaatagatatgttaaaaaacctcaaaatgcaaaaattgaagttatcctcgaaaaatcaaactaacaataataatggagttaataaaaataatcgcaaatactatattgacttcgctcacatttaaatttcttattcctcgtatcatgattcctctgaaaggatatgttctaatgagtaagaacatcacgaaaaatataattttaacgacaacattattactattaggtactgtattacctcaaaatcaaaaaccagtatttagtttttactctgaagctaaagcttatagcattggtcaagatgaaactaacatcaatgaattaattaaatattacacacagcctcatttttcattttcaaataaatggctatatcaatatgataatggaaacatttatgttgaacttaagagatattcatggtcagcacatatatctttatggggcgctgaaagttggggaaatattaatcagttaaaagatcgttacgtagatgtgtttggactaaaagacaaagatactgatcagttatggtggtcttatagagagacatttacaggtggcgttacaccagccgcaaaaccttctgataaaacttataatctttttgtgcaatacaaagataaactacaaacgattattggtgcgcataaaatataccaaggcaataaaccagtattaacattgaaagaaatcgatttccgtgcacgagaagcgttaataaaaaataaaatattatataacgaaaatcttaataaaggtaagcttaagatcaccggtggcggtaataactacactattgatttaagcaaaagattacattcagatctagcaaatgtttatgttaaaaatcctaataaaataactgttgacgtcctctttgattagtatatgaaggtgacttatacttcatgcactttaattccaaatcagattatttaaatgataatttttaaagtgtatgatgtatataataggtaaaattttctatatatttaaatggaattgggagtaggaatgtgacagaaatagtattttataaaatttatttcgttgtcactccccaacttgcacattattgtaagctgactttccgccagcttctatgttggggccccgccaacttgcacattattgtaagctgacttttcgtcagcttctgtgttggggcccaccccaacttgcattgtctgtagaatttctttttgaaattctctatgttggggccccgcctataattgaaaaatgcttgttacatgggcattttcattcggtcaactactaccaatataatattgtagagcctaagacattgatttattatgtcttaggctctattccttcatttaatgattaaattattatagcaatactttattgtcccatgattagtgttcttttaatgagacatagtaactataaagtttaataatcgttctaaatctagcatcttctagtttggttttcccatttcttaaatcttgtactgtttgatatggaactcctgaatttttcgaaattttatagcctgattcagactcaaacaaagattgaagagagtttataatattattcaactctgtcatttttaatcccctttcttgaattaacaatatacaatgttgttattaaaacagtcagtgtatggatgatttcatttcctaaaaatatattcagccatataataataagaaatacgatataaaatagtttcattttaatcccctatcatatttttattaatcaaatttcaataagattcataattaaaagctaacctatactcaaaattttcttataatgcctctaactaaaaacctacattttattttacatataatattttacactatattaaaaatacatacgatactttttcgttatctattagatatttctatgtaatggcaaaatttattcccgacgaaattccaaacataattaataccctttttctctatttctatttattaatttacactagttaatatatagttaatttttatttaatagttaattaattgatttaattctaagatatttgtatttttatattgtaatcgattacatttttaaatcaaacaaatcattagttttaaagaaattaatcaataaaattagctatgtcttttccttgtttcataaagaatttattcaactttgactaaccctcgaaattgaaatgcttcctttcaaattttaaataaaagttaaaaacatattcttaaaataatcactcatcatcactcagtaatttatcagttgctacattaaatatactaatataaacgattataaatatttgatatgtctcaactgcaatattctaaattgacatattgattattgtttcctcaaatcgttttaaaaaatagaaggatgatgaaaatgaaaacacatatagtcagctcagtaacaacaacactattgctaggttccatattaatgaatcctgtcgctaatgccgcagattctgatattaatattaaaaccggtactacagatattggaagcaatactacagtaaaaacaggtgatttagtcacttatgataaagaaaatggcatgcacaaaaaagtattttatagttttatcgatgataaaaatcataataaaaaactgctagttattagaacgaaaggtaccattgctggtcaatatagagtttatagcgaagaaggtgctaacaaaagtggtttagcctggccttcagcctttaaggtacagttgcaactacctgataatgaagtagctcaaatatctgattactatccaagaaattcgattgatacaaaagagtatatgagtactttaacttatggattcaacggtaatgttactggtgatgatacaggaaaaattggcggccttattggtgcaaatgtttcgattggtcatacactgaaatatgttcaacctgatttcaaaacaattttagagagcccaactgataaaaaagtaggctggaaagtgatatttaacaatatggtgaatcaaaattggggaccatatgatagagattcttggaacccggtatatggcaatcaacttttcatgaaaactagaaatggctctatgaaagcagcagataacttccttgatcctaacaaagcaagttctctattatcttcagggttttcaccagacttcgctacagttattactatggatagaaaagcatccaaacaacaaacaaatatagatgtaatatacgaacgagttcgtgatgactaccaattgcactggacttcaacaaattggaaaggtaccaatactaaagataaatggatagatcgttcttcagaaagatataaaatcgattgggaaaaagaagaaatgacaaattaatgtaaattatttgttcatgtacaaataaatataatttataactttagccgataacttcagaaatgatgtttttcggctaatttttatactgaatttagtttaattaacttatgatatttttaatttaaactatctacttgatttgctttcctgacttaaaaattagactaaacatgacactatatgaggtaatttttaaaataagaaatttgaattccatgttgtcaaaccctttatataaaagttttgaaattgttcaaaactttttgaacacattatgtgttaatatatttgcagaattattttaaaatcgttttaaaactatactgaaataagaaatttaaaagtataattagtacatataattgaaaaagatttctagaaatacaattaatgttcatctagatattgtacgaagttgtatgaataagttaaacttaagttgaatcaatttaaatgttcaaggaggttaacaaatggtttttaatgattgggaaattaacgttgtatactcaggagagcatgaggttgtaacaaacgaaaagagtttatttgtcattgacgaattttacgatgttgcaatcgcaatctattatttagatggaaaattaaaagtagctcatgtcaactatggttctgattttacaattgacgtagctaataaagtttttgaattgaatattcaaaatccaaatgttgatgagcattaaatattaaaaagcatttagaatcataaagagcatactatatatagccttttacatgtaaagcaaatgaaaattagataatctaattatttcaacattaaacaatatatcattataaagaagtttttaaaatagaagtataaggtggtgaacaaaaattaacattgtgtataacattatagtatatatagcatgcatgattaatttcggattaattatagtcccattattaacaacaaatgatgcggattttgtatggacttcttcatcattaatatatatgattcttcttacgtcgattatcctaatagtttatattaaaactaaagatagcttacagttaacgatatttatacttaatatagccttaattattctatactgtgcaccattactattcatttatgtattctagtgcttcattaatattttaatgcatcagtttaagtaaattccatttggaaaataaaaagcaaatatcatcatcaaattaacatatttaacgttatactttcataaaatttgaaacaattgaacatccttactttagctttatatctttatttcaagtcatgttttcaactattttaatgaattaaacatatattataaggagtcaacatcatgaataaacatataaataaaaaagccgcaaaactacttgaagattataaaaaggttcaacaaagaaaatcgaaagaaactgatagaggttgtttgaaaagtgtcatcatgcttatcgtcttatttttcttaattatttttggtattgtggcatgttctacaaacgtaaactttttcttccagtaaaagagtgagatagaaatgataaagaaccactaatgatttattatgtagtggttctttatcattagctgtagctaatgtgtacttaaaaaatgaatacatgagtaaagctcatgcataagaaatactaattgctaaagaaaaagtatttctttatcgatgtcctaccccaacttgcattgtctgtagaaattggggttccaatttctctatgttggggccccgccaacttgcattgtttgttggaattggtgatcctatttctctctgttggggccccgccaacttgcacatttttgtatgctgacttttcgccagcttctgtgttgggccccaccccaacttgcattgtctgttgaaattggtgatcctatttctctctgttggggccccgccaacttgcattgtctgttggaattggtgatcctatttctctctgttgtggccccacgagtattgaaaaaacttgttataagcttattttcatttagtcaactactaccaatatagcactagaactggaaatgataatttaatattgtacacttttgattgtttaaacatgtacatattttaaaaaataggagagcaaagtaaataattgatatagttattttgagagtaatcctaggaactattgtatttatatttgtctcccctacttttaaatgtcattcattatacataagcattttgatatagaatttatcacatatgcaaattgaaaacaggttaagaccattttttgtctcaacctgttttatttattatctatttataatttcatcaatttctttgtatattttttctaatgcaactttagcatcagccattgatacgaaatcatttttcttaagtgccgctttagctctatattcattcatcataatcgtacgtttataatatggatttaagcttcctgcagctaatgcatatacattcgatttgttaagtaaagttcttaattcttctgctatgcgtttatcatgaaactgactttcagttaaatatttgtccagactacttgcatctgctttattcccttctatagttgctatcccagttgatgataaaagtaatgctaatgttcctgttaatatatattttttaaatttcattataagctctccttaaaattgatacttactgagtatatagtcaatttcaggacaattacattaacctgtcattaaatagattacttttttcattaacaaaaattaacataacatttaattaattatttccagataacggcaacgattgaagttttatttaactaatccttgttttaatacattatcaattcgctcttgtaagaccattttcttcactttgtattcaaacgaaactaagttgactgccttttgtgcttttctgtgtgcactgacagtatgtgttttttcaaattctctcacaagattttgagcttgaatcaatttttgttcttttttaatagttgcatcagttttcgctgctggtttattaaattgtggacgtgcaccatattcgaatgtaccatcgttaaattctaaaatattatagtcatgtttgaatttaatatatttaggtgttgagttaaattttggtctagattgatatttaaaagtaccatcattgtactctacgatattgtgattaatactcactggtttcttttctcttggaccgtatccttcgctcgcatctgctgttgacgcaattgtagttgtagtaatacctattgccgctaatgttaataaagattttgctatcaatttatttttcatgttaattatcctccaaattattatcttacatttattaagttatcctatttatacaacttttgaaattaactaattattaattaactataaacactttataatatagacaaaatatagctatctatcttgtgactcatcagcacttatacactagtcaaaaaattcatgcctctactttttcgaatttcaaaaataaaaccacacaacaaaaaagacaccatttgaatgttggtgtctgaaggtataatctcatagattttatttgtaacttctcattctatagttaaatattgtgacccagctaatgattaacgttggtagaattactaaattcaaattagacacgtcaaaaaagacagattggaaattgtcgatattaatatcattaatgtccattttttcatttactgcttgatagatcgcaaagtaaactaagaaccattgaattaaatgctctaaaacgacaacctctgtcaaatcgacattcttttttctaaaaagtaatctaactataaataattggaatatacttgaaatcaagatcaatataatacccattaagaaaaaactaccaaaatcaattgtgataaattgaataataccataaataattacggcagatattgccagtgaaatatatcctataaagataaataccacacccataaagagtgtctttaagaacagaaaaggcttctttctatttgtaaccaaatagctcaatatacaaagtagtaatagaattgttaaaattttaattatcatcgtttgacctcaatatatttatttatatctttattattgaccacgaaaaataacaatcacttaagtgattgccaataatactcaatgcctactctatagtaatcttggcacgtgattttacactattttatctatttaaaaatgtaagtgttgaattatgtttacttcgaaaatgcataattcaattaaatagtataatttttaacttatatattaatcataacatatcaaccataattagaatatatctcttatttctttataagtaaaattatacatattaattacttctctactatgaatcatttctttgttttataaaaaatatatatcaaaacagctatatgtataacaatttggagtgtttgtctatccaacttagcaaacaaaatgtagagaaatgtaaatatcgttttagcaataaaaattattcaatcatagttgagtgacgtttactactattattatactatcaacaaattcaataatacctcaaataaaaataataccatcaaattcatcattattctttttcgattgcattaaaccttattaatttgcacttaattttaattaatgaagtgttaactggtaaatgtatgaaaccgtttgtaaaatagcagtgtactcgcattagtaagtacaaatttattttacagggagaacttattatgaaaaaaaatatcacaaaaactattatcgcatctacagtaatcgctgcaggtcttttaactcaaactaatgatgctaaagctttctttagttatgaatggaaaggtttagaaatcgcaaaaaatttagcagatcaagctaaaaaggacgatgaacgtattgataagttaatgaaagagtctgataaaaatctaactccttacaaagctgaaactgttaatgatctgtaccttattgttaaaaaattaagccaaggtgatgtgaagaaagcagttgtcagaattaaagatggtggtcctagagattactatacttttgacttaactcgtcctttagaagagaacagaaaaaatattaaagttgttaaaaacggtgaaatcgactcgattacttggtattaaaaaacatactgaattaaatagttgtacgccaaacgttagaaaacaatgctaacgtattggcgtgcttttttattttaagtaacttccaatttatttagcatctttacgactgtttaataaagcacgtatgattaacacggttgccactatatccgttacaatttttatgattgttaatacattcgatttccttttcacaatagccacctcgcttgttcaaaacataaacaactattgcattcacttttaagtaattatttatattatttatcccaataagctcaccattcaaataaacacaatattataaaataattatacctttggatatagcaaaaagccacactctatagcatggcttctatcaattattttaaagtattatattttaaaactagatcgatttgtctttgtaattttttcttttcataactgtgttggaaatgaattaaattaacagctctttgtgctttacggtgtgttgcaacagttcttgtacgtttgaaaaagtttacagctttttgtgcatccacaacttttttatttacttgttttttaaagtttgtttgatactgatcatattttttagcagcttcaacgtttttagtttgtgcatgagattcaccggcaaacgttgataccgttaaactaatagcagctatgcttaaaattgatttcccaataaaattctttttcataattaataacacctatcctcaaatatttattttgtatatatttataataatagacagatacaaaaaactacattaactatttattaactaaacattaatatttgtgtcactacatttctgaatttcaagaattttgctactccatattttaaccatcaaattattgatataatttatgactttagaaatccttttaaatatgtatacgattcatgattttaactaaaatttcaaatttcttgacttcttggaatcttaattttatactttttaataatacacttttaaccaaataatcaacatgattcaaccatatagggttatcaacaatcacattctccaaaattacaattcttttcataacataaatgtgttattcattccaattatcttataaaattgtcagaaatacttttaaacaaacattcatgacacgacctcctagttaaatcagtctataaactaaaaaaagccatagctacttctatttaaaaagtagtatgactgattgtttcgtgatgtcgatttttgaaattgatggtgccatgtaaagtttgatcatcaataataacttcagcatatgtttcttccattgaacttctagattgagatatacttccaggattaataacatgaacaccattaatatactcatattttgccacatgtgtatgtccataaaatgcaaacaaacaacctaattcaagtcctttttcagctaataaatctcttgttcgattgacttgatataaatgtccatgagtataaaatgctttcacgtcattatattttgcgaccgcttcattttcaaattctgggtaaaaatcacaattgccttttactctattaaataagctaagttccgtatcatcatacgcgaattctgaatctcctaaatgtaaatatacatctgcatctgggtgcatttcataaatttgatataaaacgcctgattcagtatggttatcactcacaataatccatttagacatttttatcaccttcaagaaaagcttgaagtaaattaatcgcatttcgtctatgactaatttgccctttttgttcttttgaaagttgagccatggttttatctaatttcggtacataaaatatcggatcatatccgaaaccattttcgccatattttccatctgcaatttcacctgaaacagtacctttaaatacttttgtttccatatcagggccactcatacttatgacacaaacaaattgcgcacgacgatcagttgtattaccaagcttatttaataatttttcaatatttgcttcatcgcttttattttcaccagcataacgtgcagagtatatacctggctcaccatttaatgcaaaaacttctagtccactgtcatcagctatgaccgttttattcaatgcttttgcagcagcttctgattttaatatagcattttcttcaaatgttgatcctgtttcttccacatcaaaatctggtattagttctgaaatacctattacgtggtaatctggaaatattactttaaagtcatttattttcccttgattattcgatgcaataacaatctctttcattaaaaatcctcctagtcattcactgatatacgttccacattgacagataaatttaaccactctttgataatgttagtaatgtgagtaggatcacctgttgcaaaaaatcgatgatctggatgttcagtataacttgcatgttcattactaaatgttagcaatgcactaacttcacgagccgtttctaatccagacgaaatcactgtctttttaccaccaaaataatcatagataggtttatagagcaatggatagtgggtacatcctaaaatgacagtatcagactcactattacgccaacgtttcagtgtttgatgaatgacaatgcttgtaattgttggatcactatatctcatttgttctacaagtggcacaaaacctggacaggcaacgccatgtacctctacatgtggattgatacgtttaatatgcgtacgatatgcttcagatttaattgtgccttccgttcctagtactaatacattttgatttctagtagtcattattgctgttctagcacctggttcaattacgccaatcactgggattgataaggtcttttgtaaatattctaaagctacagcagttgctgtattacaagcaatcacgagcatttttatatcaaattccattaatttacgagcgatttcaactgtatattgttttacttgttctcctggtcttggcccatatggacatcgtccaatatcacctaagtaataaatcgtctcatttggcaactgacgcataatttctttagctactgtcaaacctccgacaccagagtctattacacctattggtttattcatattcggtcatccttacttttaatttaatttttagtttatcataactaagcattggattttagtattatgcactgtgtttaccatttttgtcattataatatttattttaaatcagcccactatcatattgtcatgtaatctgcttattaaaaaaatcccttccaagttattgtgtatctccattcaatttaattttgaaaggaacataacattttaactcaaaagggattaatttttattctacttcatggtctgaaccaaagaatgatttaaacatgtggaatgttgtttctctgttcattgctgcaatggatgttgttaatggaatacctttagggcaagcattaacacagttttgtgaattaccacactgctgtaagccaccagtacccattaatgcatttaaacgttcatctttagtcatagatcctgttgggtgcaaattaaacaaacgaacttgcgagattgcttgtgcaccaacgaatttattattttcagtaacattaggacaaacctctaaacatacaccacatgtcatacatttagataattcataagctgtttgacgttttttctctggcatacgtggtcccggacctaaatcatacgttccatcaattgggatccatgctttcatacgttttaagttatcgaacattctagaacgatcaacttgtaagtcacggataactgggaaagtattcattggctctaaacgaataggttgttctaattgatcaacaatcgcagaacaagattgtcttgcacgaccattgataaccatagaacatgctccacatacttcttctaagcagttcatatcccagacaacaggtgttgttttttcacctttaatattaactgggttacgtctaatttccattaaacaagcaatgacgtttaaattttcacgatatggaatttcaaatgtttcttcataaggcttagaatcacttgtatcttgtcgtttaataattaattttactgttttttgtttcggtttagattgtgtttcatgttgtggagtgtttttcactgattgttcagtcattattttttaccccctttagacttacttgtgtaatcacgtttacgaggtggtattaaactcacatcgacgtcatcataagtaaactgcggtttttcaaatgcgccttggaatgaggccattgtcgtttttaaccactcttcatcattacgctctgggaattctggtttataatgggcaccgcgtgattcgttacggttatatgcaccaatcgtaataacacgtgcaagtactaacatgttccatagttgacgggtaaagaataccgcttggttactccaagtttgagtatcttccatatcaatatcttcataacgtttcatcaattcaacaatctttttatctgtttctaacagtttttcattttcacgaacaacagttacatttgctgtcataatttcaccaagttcacggtgtaatttatatgcattttctgtaccgcgcatagctaataatttatcaaaacgttcttgctcttcagctttacgcttttcaaaaatactttcgtccatatcagtatatgatcgatcaatatttgaaatataatcaatcgcgtttggacctgctactgtaccaccataaatcgctgataacaatgaattggcacctaagcggttaccaccatgttgagagaagtcacattctccagctgcaaataaccctttaatatttgtcatttgatcataatctacatatagaccacccattgaatagtgaacagctgggaaaatcttcattggtactttgcgtgggtcatcaccagtgaatttttcataaatctcaatgataccacctagttttacatctaactcatgtggatctttatgtgacaaatcaagatataccatgttttcgccatttatacctaatttttggttaatacatacatcgaaaatttcacgcgttgcgatatcacgaggtactaagttaccataatcaggatatttctcttctaagaagtaccaaggcttaccatctttatatgtccaaattcgtccaccttcaccacgtgctgattcactcattagtcgcagtttatcatcaccagggattgcagtaggatgaatttgaatgaactcaccattagcataaatagcgccttgttggtaaacaatggaagccgctgatcctgtattaatcattgagtttgttgttttaccgaaaataataccagggccacccgttgccataataactgcatctgaaccaaatgtttcaatctcagcagttgtcatattttgtgcaacgatacctcttgcactatcatcgtcacctttaactatgccaaggaattcccatccttcatacttcgtaactaatccatctacttcatatgcacgaacttgttcatccaatgcatataataattgttgtccagttgttgcccctgcatatgctgttctgtgatgtaatgtaccaccgaaacgtctaaaatctaatagaccttcatttgttctattgaacattacgcccatacggtctaataaatgaataattttaggtgctgcctctgtcatcgctttaacaggtggttggtttgcaaggaaatcgccaccatacactgtatcatcaaagtgaatccaaggagaatcgccttcccctttagtattgaccgcaccattaatgccaccttgggcacaaacagagtgcgaacgctttactggtacaactgagaacaaatctacatgtgcacctttttctgccgctttaattgttgacattaagcccgctaggccacctccgacaacaataagatgtttctctgccataaaaatttcactcccctaaattttcaatctatatttgttaaatgcgatgtattacataaaggcaataattgcagtaacaccaatatacgaaataactaaaaatacgattaatgaaacccatgtaaatactcgttgtgattttggagattgaagtccaccccaagtaactaagaatgaccataagccatttgcaaagtggaacacaacagcaataatacaaataatataaaatattgcccatccaggatgttgcaatgtttcgtgcattaaatcgtaattcacttctttgccgtaaaatgctttttgtaaacgtgtttgccataaatggataccaataaagataaatgttaagataccactcactctttggaagaagaacatccagtttctaaaaatcgagtaatgtccaacattttcttttgctgtaaatgcaatgtgtataccaaacaaaccgtgatataacaacggaatgtatataaataaaaattctacaataattagaaatggtaatgattccataaagttagatgccttattaaacgcttcagcaccttgtgttgcttggtgattcactaataaatgaacgaccaaaaatgcacctattgggataatacctaataacgagtgaatacgtcttagataaaattcattttttgattgagccaaaaggagtcccccctgtgaacgaatatttaatttattgagctatttatattaaacgtacgcttaaccccctaaagtgatatcgtttctagcgttgtcattatcattaagcgaaacattttaaagacaaatacacactgcacgatcaccaaactgcatgtcgaacaatgtaacatttggattcgatatttaaaattgcttgtgatgataaactttctcatttagaaaacgcttccacgtacattcaaaaaaataactttgttaaccatattgtaacattatttcatatattttggggcatgagaatgattctcacgcccagtaatttatttatgcaattgttcatgtaggttctttgcgacgttttcaggaatacctatatttttaaaatcttcaagtgtagcttccttcattttcttgattgaaccgaatgaacgcaataataatgttttacgtttgttaccgataccatctatatcatcaagtattgatttcaagcctgtcttttgacgtgtttgtctatgaaatgtgattgcgaatctgtgaacctcatcttggatacggtgcaacaaataaaatgcctggctatttttttcagtggtacaatttctgcactagcgccatataataattcagatgtttggtgtttatcatttttctgcaaacctgcaacagggatatcaagacctaattcgttttgtagcacatcaataaccccgttcatatgtcctttaccaccatctactattattaaatcaggtaatggtaatccttcgtttaaaacgcgagaatatcgtcgtcttactacttctctcattgatttgtaatcatctggacctttaaccgttttgattttatactttctataatttttcttatctggtttaccgtcgacaaatgtaaccattgctgacactggatccacaccttgaatattagaattatcgaatgcttcaattctaattggtgtttgaattcccatttgtgttccaagttcttcaatagctttaatcgttctggactcatcacgtgatattaattcaaatttattatttaaggatactttagcgttatgtgcagctaggtcaaccatatcttttttgggacctcgcgcgggttgaacgattttagtgtccacaacagattgaatcatttctttatccaaattacgtggtacatgaacttccttaggtaaaatatgttggtttaagctataaaattgtccaataaatgtataaaattcttcttcttctgtttgctgtaatggaatcatcgttgtatctcgctttatcatattaccttgtcgtataaagaaaacttggatacacatccatcctttatcaacactataaccaaagacatcacgaatcgttttatctgatgacataattttttgtttgtttgtcagattttgaatatgttgaattaaatctctatattctttagcccgttcaaaatcaagtgattcacttgcagttaacattcgctcttctaaactttttaaaattgttttgtcttccccattcagaaaatcagtaatttccttcgtcatttgtgcgtatttactcaaatcaacgtcatatacacatggtcctaaacattgtccaatatggtaataaagacataatttatctggcatcttatcacatttgcgatatggatatattctgtctaataactttttagtttcttgagcagaatatgcattcggatacggtccgaaatatttgccagtaccttgttttacagttctcgtcactagtagtctaggatatttctccttcgtaattttaataaatggataacttttatcatcctttaataatatattatatcttggttgatattgtttaatcagattcaattccagtaaaagtgattctgtttcacttgacgtgacaataaactcaaagcgacgtatttcaccaaccagtctcgttgttttagcatcatgagcacccgtaaaatatgatcgcaatcgatttcttagctttttagctttgccaacatatatcacttgatcattacgatctttcattaaatagcatcctggttccataggtacgacatttaatttatttttaattcgttgcttatagtcttccaaaaatatccccccttctaattttaaaatgaatgatgctacaaaagtgcttcaaatttatcaccactaattctagttaataatcaacatcttcgagtatgacttttcatgcacatcatgtaatattgaacatggttttatcaaaccaactgctacaaatctatcagcatgctagattatcatttaacgttcatagatttattaatcccaccattctcaagtcgtaaacaatatgatgacttatcattcaactttttatattaaaaacacaaacaaaaactggagcaattcattaaagaaatgccccagtcgtcattggttgtaacttataaatgtttatctaaaacttcagctaagttttcttttggttggaaaccaacaactttatcaactggttgaccgtctttaaagacgattaatgttggaatactcatcacttcatatttagctgcagttgatggattttcatcaacatctaattttaaaatgtcagctttaccttcatagtcagctgctaattcttctaataccggagcgatcattttacatggaccacaccatgttgcccaaaaatctactagttgtacaccagattctacttttgaatcaaaatctgcatctgttacttttacgattgccataaatgccaatcctccttaattattattatgatgttcaaattatatcagataacatgcttcatgtatttctatttgctcaatttttatgcttatttcaaataacatgtttgaaatgtattcttgttgctttacattattttaactgcagctatttaatttatcaaattataatttattttagtgttgcaacggtaacgccaaatccaccttcgcttggcataccacctctaaagtcactaacacttttatgctttttcaaatgttgttgtacacctttttgaagtgcacctgtacctttaccatgaatgatataaacttgttcgtaattacttaaaacggcttgatctaaatattgatctagttcaattaaagcatcctcataacgatagcctcgtaagtcaagttcagttttaattgtttgacgattttgacgtgtaaccattttcgttggcttaactttttctttttgttttttctctaaatcttcaataggtaacttcattttaataattcccatttgaacaattgcttcttcatcattgacaatttctaaaacttcacccttttgaccgtaagataatacttttacttcatcaccagcaacaattttatcgtatttttgcttttgtacattttgctttatagatttcgcttcataatgatcatctaatcgtttcttcttatcaatcaattcatgttctttaacatctgcacctttttgttcacgcaattgtcttaagtctttaataatatcgtcagcttcttttgttgcagccttaatcttctgatttgctttttctttcgcttcctctattagagacttttcataattttggaattgttgatactgcttagataaatcatcatgcacttgctccgcttcttttacaagacggtccagttctaacctctgtgtctctacacgtttgtaattacgctctaatgattcaatcatttcatttatttctttttcatcagtaccaatcatcgtcttagccttattaataatattcaaactaagacctaactttttagaaatgtcaaaagcatttgaacgacccggcacacccattaataacttatacgttggactcaaagtatctacatcaaattctacactcgcattcataacgccttctcgattataactatatgctttaagttcaggatagtgcgtcgttgccattactagagaaccaatttttctaacatgatctaaaatgctcattgctaatgcagcaccttcactcggatctgtacctgcacctaattcatcaaataaaactaaactatgtttgtctgcatgctttaaaatttcaactatattcgtcatatgagatgaaaaagttgataatgattgttctattgattgttcatctccgatatcgcaatatacatttttaaatacacttaactgactaccatcaagtgtgggaatcaacaatcctgattgagccataacaataattaaacctaatgtttttaatgttacagttttaccacctgtattcggtcctgtaataattaccgtttcaatatcttccataaattcgatggtattagctacaacagtctcacgatttaataatggatggtatgctttaggtaaatatacagtacggtcctctttaaatatcggctttgttcctttaatacttctactatatctcgcttttgcgattaaaaaatctaactgacccatgacttgttctgccacaagtagtgcatctttgtccgcagccacataaccagttagttgcgttaaaatgcgttctttttcaattgcttcgtcatgacgtaatcgactaatttgattattcatttcaacaactgatgatggctcaatatacaatgtttgtcctgaagcagattgatcatgtacaatcccattaaaatcttgtcgatattcagctttgacaggtataacgtttctttcattcctaactgttacaatagcatctgataattttttctgatttgcttggcttttaacaatacggtccaaattttgtctaatacgttgattcgtgctagaaattttacttctaatcccttgcaattcataactcgcattatcatataaatcatacgtatcgcatgtttcatttatttgttgaaaaagatcagttaacacaggtaattgattcatcttgtcatctaatattgggtatttaacaccttcatcttcttcaaccaattgattataaaatgtcttgaattgattttgtacttgaattaatctttttatcaagttaagctctgatacatttaaaacgccgccaatatcagcgcgatgaatgaatgctgatactttagataagccactcaagcttggtaaacgatgcttattatagatttgagcaatctcatccgtttcttccatttgaaaaacaaccgtttcaaaattagtagctggcatcatttgattgaccttttccaagcctaagtcactaatagtttcattggcaacgagtgattttattttttcaaattctaagacgtctaatgttttttgtctcataaaatccctctatttcttaagttttgtattattttcaataaagtctttaaaagcttcacgcgataatgcgttaatcactctatcttttgttacaaatcctttttgcgcagttgctacgccataattcataaaatctaaatgatttgtatgatgcgcatcagtgttaatagttaatttcacatttggatatttacgaacgatatcagcgctcagatccagtcgatgtggattggcattaatttctaatactgtattcgtttcttcagctaatgccattaattgttcaatattcggtttataaccatctcttctacctataatacgccctgttggatgcgctatatgtcgcacgtatggattgcgacatgcattagctaatcgttccataatttgttcttctgattggttaaagctttgatgaatagctccaattacataatcaagttgtgctaaaatttcatcatcataatccagcgagccatcaggtaatatatccatttctgtacctgaataaatatcaatttcactatattctttatctaaagccttaatttcttcgttttgtcttaaaagtctttctacttgtaagccattagcaacacgtaaactttgtgaatgatcagtaattaccatgaatttataaccttttgcgatatttgcttctaccatgtctcgaatagaaaacgcaccatcactatacgttgtatgcatatgaatatcaccattaatatcatctattgtaatgatattacttagatctttatcaaattcgctaccatcttctcgcatagcaggtggtataaaattcacattaaaatgttcatatatcttggcttcactatcatattgaattaatgtaccatcagcttgttcaattccatattcacttactttttcatcacgtgctttagcaagttgtcgaattcttatattatgttcttttgacccagtaaaatgctgcaatgtatgataaaaagcacttggttcaattaatcgaaaatcgacaccaatcgtttcatcatcatacgctaattctaatgaaacttttgtgttccccactgcaacttcttttactttattgggaatatttaataattgctgctgcactgcttttgggttatcggtacttattatgaaatctaaatctttgctcatttctttaaaacgacggaagcttcctgcagatgaatattgatcgatataatttaatgtatctatataatcaatgatttcttgattaagtcttctcatttgatcaattggatatctatctttcttagcaccaagttgtttcacagcttctaatatgttttgttccgttttcttagcaaatccgcttaattcactaacttttccattttcacaagcaacttgaagtgacgctttatcaacaatattcaactctttatatagcttagcaattttcttgcttccaagtccttgaattttcaaaagtggaataagaccttccggaacttcttcctgtaattgctgtaaatactgagattcaccggtctcacggtaatcattgattacttctgcaacacctttaccaatgccttttaactccgttacatcagatatttcatctaatggtcgttcatctaattcaagactttgagctgcttttcgatacgctgatattttaaaagtattttccccttttaattccatataagtagcaatttgttctaatagtttgataacatctttttttgtcataataacactccataaaaagaagaccaggacgtatcattaatatatacctttgtcctgacctcttatgataatttataaattaatggtgaaagccgataaatatgggatgtgaaaaatcaatgaatgactcacaatagatattttaagctgatgttgtaatgcttcgttaggatataatgccaatagatataacgtaaagtgtaagacaattatcgtcataaacacaccaactatcattcccattgcacgactgaaaatatgaatgttttgatacgctattattttatcaaaagttacgataattagatataaaatgaacttacaaaacaatgtaatcattaaaaaagctacaatcgcttcaaatcgattttgtagatgattaaaatgaaacgcaaaagttgtattaaatgctgttgttttaggatatggaataaatacaattaatctttctacaatagatttgtaaaattgactggcaatccacaatgatacaatcgttgcactcaaatgtatcatagataaccaaaaacctcgtctgaatccaacgatgacaaaatacacaaagaaaatgattatgataaaatcaatgaccatttattgctcacgctgctgcaatttgtgaatttgttgtttcaaacgtcgattttcttcttctagtagtactttttcatgcataatattcacagcagttagtattgcttttcttgaagtatctaaacctgctgctttataccctaattcttttattttatcatcaactaaatgtgctacatatcgtatgtgctctgggttatcttccccaacaattgtaaaaagctgatcattaattgatacatttaccttgtttttaaactgtgtcatttataatttctcctgatcctttttttaaaatctaaattcacgttataaaatatgactggatagtttgtctgaatttgatactaatattgttatattgcaattatgataaaacaacaacacaatctctatagatgacttaatgttctttttataatgaaataatgtaaagaattttctattcaatactttatcatgtttaaattgtgtcactataacattttcataaacattatacatgaccactatgtattttgtaagtatccgcaattaattctttacaacatacataaatgtttctgacgttattatcatttatgatatgattatttttgctaaagacaatgaaattttatgaaaggatttacacaaatggcgaatatcgtttttaaattgtcggataaagacataacgacattaatgtcacgcatttcttttgatactgagaatttacctcaaggtatgaaagcacgtgcaaagtatcaaaatacaactgtaaatatttaccaatcaggtaaagtcatgtttcaaggtaatcatgcagaagctgtgtctgaagaacttctaccgcagcattctcaattgaatactaataaaactaaaaagaaaaatatggctaattcttttcttgaacaaactttaatgtatgatcaatttaactgtattggtagtgatgaggctggaagtggcgattactttggtccgttgactgtgtgtgctgctttcgttaccaaagagcatgtccctattttaaaaactttgggtgtagatgattcaaaaaaattaaccgataccaaaattgtagaacttgctgagcaattggttactttcataccacattcattattaacactacacaatgaaaaatataatattcagcaagcaaaaggctggactcaagtaaaaatgaaagctgcccttcataatgaagccatcaaaaatgtacttaaaaaaattgattcgtctcaattagactatatcgtcattgatcagttcgcaaaacgcgaagtgtatagccattacgcattatcagatataccacttccaaagaaaacaaaatttgaaacaaaaggagaatcgaagtcattagccattgcagtggcaagcataatttctcgatacgcatttgttacatatatggatcaaatatcaaaaaatattaatatgacgattcctaaaggtgccggtgctaaagtcgatgtaatcgccgccaaaattataaaaaaatacggtctttcacgtttagataccatttcaaaaaagcattttaaaaatcgtgaaaaagcccaaaaaattttaaagcctctttgatttttaatcattagaggcttttatgcagttgtgcgaagcatcatctgtattccgctgttcctctttgactttttaaatgcattggaaccaaattggtgaacccaaaaataaaaccccatgttagggatatcaatctacttcagatatccttatacatggggtttaaatcattatctaataacagcaccttgttcaattaatgctgcttcaatttccgcttgtacttttgaaacgcgctcatctgtcaatgtttcttctgtgtctaaataatttaaacgtattgcaattgattttttacctttttctaaatgttcgccctgatatacatcaaagacaagtgtatcttttaatatattgccaccatgtgcatgaatcgttgataataaatcagctgctggaatattttgatctacttctaatgcaatgtcacgagacatgcctgggaatctcggaattggctggtaattaatgtaacctaccgacacagccattaatgcatcaaaattcaactcaaaaacatacgtacgttttaaatcattatcagctgctaatattggatgtaattcaccaataaaaccaacaactttattctctaataagatttcagcagtacgacctggatgtaatccatcaatatcagcacggcgataactaaattcaagatttaacttttcagatactcgatccacgacaccttttgctaaatagaaatcaaccgtttctttcttaccttgccattgattgactacataatctccagttaaaataccacttaaatattcaacttgatctggtagttcaccttctccattagcaaagaagacattgccgatttcaaataattttacatctttatttttgcgtgccacattatatgatgccgcttcgattaaatgtggtaataaactttgacgtaatgacgcatgcgcttcactcattggcatcaataaatcaattgtttgacgctgttgcatcgaaaatgcagtagcatcttctttagaaactaacgaatacgtaatagcttggtctaatccagcaccttctaacacttctttaaccattctagttttatattggcgatcagttagctgaccactagtaactttatcgaagacaggtaacgttgatggaatatcgtcgtatccatatatacgtgcaacttcttcaattaaatcttctttaattgtaatatctttacgacgtgatggtactagcactgtaataacatcatcatttatttctgtatcaaaccctagttgattaaaaatagtaacaatatcattttgtgacaaatcaaatccaatagtgcgattaattttatcagcagtgatgtcgattggtgtaataaatgcaccaagttctcctgaagacactctatcttttagcacttttccgtttgcataagtttgtaataaataacatgcacggtcgactgcttcatctacaaattcagtagctattcctttttcaaaacgactagatgattcactgcgtaaatttaaacgtcttgatgtatgacgaattgaaactggatcaaaaatagcaccttcaatcactatatttgatgtttgttctttaacttctgaaaaatcgccacccataacaccagctaatgcaattggagtttgtccattagtaatgacaatatcgctcgttaataattcacgttctgtatcatctaatgttgtcattttttcgccttcattagcttgacgaacaacaatttgttgtgaaccaatcgcatcttgatcaaacatgtgcaatggttgaccgtattctaataacacataatttgaaatgtcaacaacattattaataggacgtatacccgcttttattaagcgtgcttgcatccaaattggcgagggttcaattgtcacgtcgtgaacaacacgtgcactataatatggtactttatcttcattttcaattgtcacagtcagttcatcatttgcagataaatcaagctcatttgatgttgtctctggcttagtcatttttgtattatataatgctgcaacttcataagcagtacctatcatacttaaagcatctgcacgattcggcgttaaatcaaattccattacttgatcatctaaatataaagcttgtaaggcatctgttcctggaacttgggcttcactaaatacataaatgcctgattcaaaacttttcggtatatagttacttgaaataccaatttcttgtaacgaacaaatcataccttctgaacgttcaccgcgtaatttggcacgcttaattttaataccaccaggcaatctgccacctactttagcaacaatgacatattgtcctgcatcaacgttcggtgcaccacaaacgatttgtacaggttcgtcttctccgatatcaacttggcaaacatttaatttatcagcatcaggatgtttctcttttgacttaacgaagccgacaactaaatttttgatatcttttgtgtagtcaattaaatcatccacttcaatacctgtgcgcgtaatacgttctgccaaattacttacagaatcatcgattgttacatattctttcaaccattcatttgatatcaacattacatgtcacctctatcttctaccgctttaaattgatctaaaaatctcacatcattagtatagaaatgacgaatatcttctataccatatttcaacattgcaatacggtctggtcccataccaaatgcaaatccagagtactctgaagaatcaaaaccagccatttctaatacattaggatgtaccattccagcacctaaaatttcaatccatcctgtgtgtttacacacattacaaccttttcctttacatttaaaacatgacacatcaacttctacagaaggttcagtgaatgggaagtaacttggacgtaaacgaatttcacgatcagcaccaaataatttcttagctaacaattctaaagtacctttcaaatcactcattttaacgtttttatcaacaactaatccttcgatttgtgtaaattgatgactatgtgtcgcatcatcagagtcacgacgatacactttaccagggcaaataattttaactggaccttgaccatgacgtgattccatcgtacgtgcctgcactggtgatgtatgcgtacgtaataaaatttcatccgtaatatagaaactatcttgcatatcacgtgcagggtgtgatttaggtaaattcagcatttcgaagttataatgatcttgttcaacttcatatccattcacaatttcataacctaaacctaagaataagtcttcaatttcttctattgtacgtgttaatggatgctttgaaccgatttcaatatgacgacctggtaatgatacatcaattgtttcttcagccaattgcttatttaatttttctttaactaacatctgttgtctttcatctaattcattttgaattgtttgacgcaattcattcactttttgaccaaacgcaggtttatcttcattcggcaaatccttcatcaatttcattagtccgctaactgacccttttttacctaagtatttcactttaacttcttgcagtgcacgttcatcatttgcttcattaatatctacaagcgcttgttgttttaactctgacattgtttgttgttcagacatatgtcactgacctccctattcgaactattcattttctatttatcatatttgttgtttaactaaaaaaagactttcatcctcttaaaaaataagggacgaaagtcatttccgtggtaccacccaaatttatgcctaagcatacacttgtttaatattgataacggattgtctttccgacttaaatctctttaagtaaccaaaaaggtgaaaagactttaaataattggaataacttgcagtcacgattattctccctaaaacaattatttatataaatgtccatgcctttttattggtttatattcaattgtgtatgcattcacgtagaaatgttctgttaaacaattaattataattatatcggaaaactttcaacacggtcaacctttcaaatgataaagtaaaatactacctgcaatcgctacatttaaactttcagctttaccataaataggtatgattaaattttgtgtagtatgtgctaataattcaggattaacaccttctccctcattacctaatagtaatgcaaaagaatcacttgaagtaacttctttgtatgccactgcgttttcaagtgctgtaccataaacaggaccattaaattgagtaataaacgtatcgagatcttgtgtcataactggcaaatggaaaacactaccttgactcgctcgcaacactttatcttgataaggatctgtcgtacccttctccattattacagcatccattccagcagcatccgcagttctaattaatgtgcctaaatttccaggatcttgaacacgatcgatgagcaatacttgttgtgctttagaaatatcataatgcggcttctcaatgattgcgaaaaacccttgtggtgtcactgtacctgataaagattcagcaactttcatgtttatttcaaaaacttcttgcgcgtatgcgataatttgctgatctaatcttgccggttcaattgcaaataattgtgtaattacaattccactttgataagcttcttcaattaaatgcacaccttcaattaaagctaatccagttttatccctctcacgtttcttttttagcttgttcgcttgtttaattctattattttgtgcagaagtaatttgttccattgatagctcctcgctttatttttaaaaataaaaatattaatcattaataagatgaaaacatttgattgtatagttaatattaattaatcgcttttatcactcataatatttcaaattgtataaatttcttttatcgatactactactataaatcatacgccccaaaatatcattattaattcttttcttcttcaaaataaatcaaaatgatataattgatgattattttcaaagcacattcaaatcaaactatgttttagcaatttgttgttagcatgtttgtgttcattaaaaaaacgaccatcatcggtatcatgtatggtcgttacaaaagctaacaataccaattgtcataacaagtactgcaacctctttaaattcaattatttcatgtaactatagcctatatcatatgtaattactttgttatttataatcgggctactttcatcttcatttttacttctaacatgtttatgcgctgctttaaagacatcagattttaaccaatccgtaaaagcttgctttgatttccaaactgttaaaattttcacttcatcaaaatcttcttgttctaaagtttgtgtaacaaacataccatcaaagccttctaatgtttcaatcccatgtctcgtgtaaaatcgttctataatatcttttgctgttccttttgttaacgtcagcctattttctgccataaatttcataattatcctcttttctgtttaacttaccttaattatttttgcgacaacaacaattcttttcgtcgtttcactatatgcatcttcgcacgttgataaagtcattattctatcttttaccgttacattaacatctgaattaattacagatttacgttttgtctcatctaaaaattgttgataatcttgatcattttcaaaatctgtacgtatgtaattatctttagtagtagttttatatgcactaaatacttgcaattgatatttaccatatttattgtcaaattcaattatcttgtgtttttcataaaacgattgctttaaataatcttctaacacatcaaacatcgtattatcaccgacatggtgcccgtataaaatagtattatgatttaaattcttcaattcatttctaaaatccataaaaatactacctttacgtcgatgttctcgctcaaaatctaaatttaaataatcgtgatttgtcttaccttgtagtactggataatttaatgatgttcctgataattttatccatccaacaatgtctttatttattttttcaagtgattcaaattgtggtctcacatgttcttgatgtttgctcatcagcatttgaaatttttgttgtaatttctcataatttgcgcgttcttgcttgtcttcaatatatgtttgaacaattttgtaaccaaaaatgataataattacaaccaataaaatttgtacaatagttaaaaatcgcttcattctcataaaaatcctcttttattaacgacgtttcttcagtcatcactaaaccagttgttgtaccgttttagattcgatttcgttgactttgacaaattaagtaaattagcattggaccaccgacaatcattaaaatagcattggctggaatttctaaaggaggctgtatcactcgtcctaataaatcagccactaacaatagccatgcaccaataactgtagaaaacggaataagtactctgtaattgcccccaactagctttctaaccacatgtggcacaataatacctaaaaaggctagttgtccaacaatcgcaacagttgcacttgctaaaaatactgctaataaacctgttaaccatctgtaacgatcaatattaaaaccgatacttcgcgcttgtatgtcgtctaaatttagtaaattcaatttaggggacaatagtaatgttaatattaatcccaataatgctgatactgctaatatgtatacgtcgctccatattttcattgttaagccttgaggaattttcattaaagggttttgagttaaaatttctaaaacaccatttaataatacgaataacgcaacacctactaatatcatacttacagcattgaatctaaatttagaatgcaacaatataattattaaaaatggtattaaacctccaataaaacttaataatggtaagtaaaagtacaattgtggaataaacaacatacaaagtgctctcattataagtgcacctgaggaaacgccaatgatattcgcctctgccaaaggattttgtagtgctgcttgtaataatgctccagaaactgctaacattgcgccaaccatcaatgcaattaatatacgtggcaatcgcaaatcaatgattgaatccactgcttcattgctaccagttgtaaattttgtaaataggtcattaaatgacaatttaattgtaccggttacaaacgaaatataagcagttgcgattaaaatgactaacaaacataaaaatagtagtttctttttattttttatcatcatatcaactcactattttttatccttataaaataaatcatataattgagtcattgccttatcagcatcaacatttgctgtaataccgaatggcacttcctctaagtcataaacatgattatttttcacagctttaaaatgtttccaaatatcattttgtttaaattctttttgaaacattttcttaacttcttcaggcattccgtgtggtaatcgtaaaataatatctggattgatattcaacaaattttcagtattagacgaaatatattgacgatctttcactttaataacattttctccacctgctattttaactaaatcaccaatatatgatttatcagttgctactaaatagctacccggtacacccattaatattaatactttgggatgtttcttttgtttagctgctttattttcaattttttgctttacagaatttaaatggtcatttaattcttttgcttgtgctttacgattaaattgatcacctaattgtgtaatcgacttttgcatcccttttaaactatcaaaatcataaaagtagcctttcatatttaattgtttgtaaaatggttgcatttcatctttaatcgttgacacactcaaaacatgtgttggttttaactttttaacagcttcaacattcggctccattggttgaccaatttccggtacatctttataacgattaggcaatgtcttatatgacgtgggtttgccgacaattggtaaatccaatttgtccaatgtcattgtcaatgcaacagttgttggtacgattctgaattcgccggatttagttgattcttgagaactggaagattgacagctggttaagataacgacgcttatcactaaaatggttaaatactttatgattctcaaacttggttacctctctttctgctgtataaatgtgccgaaataagtaaaatagttgctaacacaatgccagctgcaaataacatatattgctttttatgatttggttcatcaagttctttaatatcactagataattgactactattcttgctatcatcatctctattaaaagctggtaacgctttttctttttcaactacttttttcttttccttttttgatttttcatctttatgtttcggttgctctttgtgattattttcaaccttttttattgttggagggctattttcaacttttaatgtacctgatgctttaggtcgctcattttcaatctttttattactgtcttgttgcactttatctttttgtacaggaatatcatttaatcctttttcagtaaaaaggctagtacgtctttccttagtatctgatttttgactatcttttttgtcatcaatatcttttttaagctgatcttgattattttcttgattttgatgttttgaaggcacttcttttgcatcatcatgttgtacttttttctctttaaaatgaatagaatacaccatttctttgttatctagatttttcttttcagccaacgttttaacatgcatattgattttatccatatgctgttcaattaaaattcttactattgtgtcatccttttcatcttttataacaaaaggaaattcttcatttttgtcattttgaaaaacaagttgttctttatctatttgaccttttagctttacttgcaagtaaattttaccagtcatatctgaaatcaattgcgccttttcgtcaactagttgttgttcctcagttacatttttattttcttgattaaaaattagtaactctaacgctttattctcttttatcttttcatcaaaaattgatgtagttaattctgttttatcttttgcttcaggttgattaaatttggctgatggatattttatctcatcagccaacacgctaccaatcattgttgtatatgtaagtatacctaagctaataatagctataatagattttgtagcaatttgtttaacatttctcattattccacattgcctttagatttttttctaacaaacaatgtgattgcgattaataatgctaaggatgcaactggtattgcatatatatatgcaggtgtaccagcatttgtttgtggattttctactttgtctttattcgaactattagattcactttgaccagtagtcgttccatcagatcctttgtcactacctgaagcagaatttttatcatctttacctggtgcattagcacctgctacatcagttggtccattaaatttatatgtaatgttgtaatgatggtcatatttgaatggctttccatttactttttcatcgatataaacgtcaatttttccatctattttaccgttcaacttacttacttcaaattcagaagtgcgttcatctttggcagtgtttttactaataatattttctttatgtccttcgatactcattccagtaatccaatgactgtggttgacagttatttgaacatacaatttaccatttttcttaatgtactttgccggtttattaaaatagtcattagcaattgacgtgtcattggtattgtatttgtaaacctcataattcaaagtaccgctatctgcggcatttgcagaattactgaatgtcgcgatgatgataattaacgctaaaatcgttgtattaaaaacttttaaaatatttttcaaaacataatcctcctttttatgattgcttttaagtctttagtaaaatcataaataataatgattatcattgtcaatatttattttataatcaatttattattgttatacgaaaatagatgtgctagtataattgataaccattatcaattgcaatggttaatcatctcatataacaacacataatttgtatccttaggaggaaaacaacatgacaaaacattatttaaacagtaagtatcaatcagaacaacgttcatcagctatgaaaaagattacaatgggtacagcatctatcattttaggttcccttgtatacataggcgcagacagccaacaagtcaatgcggcaacagaagctacgaacgcaactaataatcaaagcacacaagtttctcaagcaacatcacaaccaattaatttccaagtgcaaaaagatggctcttcagagaagtcacacatggatgactatatgcaacaccctggtaaagtaattaaacaaaataataaatattatttccaaaccgtgttaaacaatgcatcattctggaaagaatacaaattttacaatgcaaacaatcaagaattagcaacaactgttgttaacgataataaaaaagcggatactagaacaatcaatgttgcagttgaacctggatataagagcttaactactaaagtacatattgtcgtgccacaaattaattacaatcatagatatactacgcatttggaatttgaaaaagcaattcctacattagctgacgcagcaaaaccaaacaatgttaaaccggttcaaccaaaaccagctcaacctaaaacacctactgagcaaactaaaccagttcaacctaaagttgaaaaagttaaacctactgtaactacaacaagcaaagttgaagacaatcactctactaaagttgtaagtactgacacaacaaaagatcaaactaaaacacaaactgctcatacagttaaaacagcacaaactgctcaagaacaaaataaagttcaaacacctgttaaagatgttgcaacagcgaaatctgaaagcaacaatcaagctgtaagtgataataaatcacaacaaactaacaaagttacaaaacataacgaaacgcctaaacaagcatctaaagctaaagaattaccaaaaactggtttaacttcagttgataactttattagcacagttgccttcgcaacacttgcccttttaggttcattatctttattacttttcaaaagaaaagaatctaaataaatcatcgtcacactcataacttaatatattttttattttaaattttatttaacctatgtcatagatatttcataatctataacataggttatttttttataaaataacgttgcaattaactaacatttcaatgtacaatacaagtaatcaattgataatgattatcagttgataatatacaattaggagttgtttctacaacatgaacaaacagcaaaaagaatttaaatcattttattcaattagaaagtcatcactaggcgttgcatctgtagcaattagtacacttttattattaatgtcaaatggcgaagcacaagcagcagctgaagaaacaggtggtacaaatacagaagcacaaccaaaaactgaagcagttgcaagtccaacaacaacatctgaaaaagctccagaaactaaaccagtagctaatgctgtctcagtatctaataaagaagttgaggcccctacttctgaaacaaaagaagctaaagaagttaaagaagttaaagcccctaaggaaacaaaagaagttaaaccagcagcaaaagccactaacaatacatatcctattttgaatcaggaacttagagaagcgattaaaaaccctgcaataaaagacaaagatcatagcgcaccaaactctcgtccaattgattttgaaatgaaaaagaaagatggaactcaacagttttatcattatgcaagttctgttaaacctgctagagttattttcactgattcaaaaccagaaattgaattaggattacaatcaggtcaattttggagaaaatttgaagtttatgaaggtgacaaaaagttgccaattaaattagtatcatacgatactgttaaagattatgcttacattcgcttctctgtatcaaacggaacaaaagctgttaaaattgttagttcaacacacttcaataacaaagaagaaaaatacgattacacattaatggaattcgcacaaccaatttataacagtgcagataaattcaaaactgaagaagattataaagctgaaaaattattagcgccatataaaaaagcgaaaacactagaaagacaagtttatgaattaaataaaattcaagataaacttcctgaaaaattaaaggctgagtacaagaagaaattagaggatacaaagaaagctttagatgagcaagtgaaatcagctattactgaattccaaaatgtacaaccaacaaatgaaaaaatgactgatttacaagatacaaaatatgttgtttatgaaagtgttgagaataacgaatctatgatggatacttttgttaaacaccctattaaaacaggtatgcttaacggcaaaaaatatatggtcatggaaactactaatgacgattactggaaagatttcatggttgaaggtcaacgtgttagaactataagcaaagatgctaaaaataatactagaacaattattttcccatatgttgaaggtaaaactctatatgatgctatcgttaaagttcacgtaaaaacgattgattatgatggacaataccatgtcagaatcgttgataaagaagcatttacaaaagccaataccgataaatctaacaaaaaagaacaacaagataactcagctaagaaggaagctactccagctacgcctagcaaaccaacaccatcacctgttgaaaaagaatcacaaaaacaagacagccaaaaagatgacaataaacaattaccaagtgttgaaaaagaaaatgacgcatctagtgagtcaggtaaagacaaaacgcctgctacaaaaccaactaaaggtgaagtagaatcaagtagtacaactccaactaaggtagtatctacgactcaaaatgttgcaaaaccaacaactgcttcatcaaaaacaacaaaagatgttgttcaaacttcagcaggttctagcgaagcaaaagatagtgctccattacaaaaagcaaacattaaaaacacaaatgatggacacactcaaagccaaaacaataaaaatacacaagaaaataaagcaaaatcattaccacaaactggtgaagaatcaaataaagatatgacattaccattaatggcattattagctttaagtagcatcgttgcattcgtattacctagaaaacgtaaaaactaataaatcgtctttatatttaattattaaattaacaaattttaattggcggatgaggtatccagatacctgatacacacttccaacaaaaacaaccacactcctaaattaataggtggtgtggttttgttggttgtgtggtaaaaaataaccgcatcggttaagatacggttatctagcaagtaccacgtacttacgaatacgtttagaatctcttcggcaaccttgctatagacagtctatgctgttactaaattaaaccaccacacaaacctactcccgttcaggaacacagagctttgtcgctcgtcagcaacgtcatatgaattctcagttcatgttgtggcgacactttaaacagtctgtgccagtagcgaccgagtcatttcaagaatgaccatttcacatttatattataacataaaaaccacccagcaactagtatgggtggtttaaatatgcagtcagcttcttactactttacgcaagtaagtcctctgcatagccggattggctaccggaaatgtggttttaagccagattggttactggtaatgtaattacattataacataaaaaataggcaagtaccgtagtacctgcctgttatctacatttaaatcttgagagaaatgttaaaaagttctagtaaaataatagcacattttatctttaaatgtaaatagaaagcaggtatgtaacgcacctgcttaaatagacatgactatgtcattctaactgatttctccccataagtcacctaatatctgattaggtggggcagaaccattccatgttctaataggcaagtaataacgttgcccctcccatgtatatcctacccaaacatgaccatcttgtaacatcacttctgtataatcacaatatccaccaggttggaactgataacccactggacaagataagaatggccccacttttcttactgtgattggttgattgccgtttgtgaatctagcactttcttccatgtagtaagtaccatatttattacgtttccatgcacttgcaactggtttaactgtattacttgaagcgcttgactcattagagacagtggcaaccggtattttaccatccatgtacgccctaatctgcttgataaagtagtctttaagttgcaaccgcttgtcttctggcaatagaccgcgagttactgggtcaaaaccagtgtgtaaaaccgaacttctatgagggcatgatgttgaagtaaattcattgtgcaatctgattgtatttctgtttgctggtaatccccattttttcaacaatctagcgcattcttggaaagttgcctgttcattttttaagaatgtcgcgttatctgcgcccattgattgacatacttcaataccgtaataatatttattacctatttgattagcggtatgccaacctacttgtgattcatctaaggcttgccaaactgtgttgcctgatacgtaactatgcgcaatgcccgcttctaatcttgataaaggtgcatttactaatccgttacgatatgcttcagcagtcgcccctttgcttcctgcgtcgttgtgtataactatacctttagggttactaccacgcttaggtaggtcataacctttaaccacatctttgatgattttaagttctactgctttaggttgtggcttagctgtttcttttttaggtgcttgtgtaggagattgaactgatcgtggcgctgtctcacttttaaaattcggacggataaaccacatagggaaatcataagcatgttgtcgtcttgtaactttttcccaaccccagccgggttgttcgattccgtcagtccagccaccgcctagccaattctgctcatatacaatgatgtaatctaaagttgcttcaattacccatgcaacgtgaccatatccagcaccgtagttgctaccgaataccaccatgtcgccaggttgtgctaagaagtccggtgtattttggtatacagtagctagtccatcaaaattgtttgcaaatggtatatcttttgcacctaaaccttttagaagtaatccaaacaaaactttccaaccagcattggcataatcaaagcattgaaatccataccataagtccacattgaattgttttccctcagaagttttcaaccattctataaactcttttttagttaattttgcttgcatcgtcgccacctccatgatgatactcattcacgtcaaaaccaacatcgttagaggcgtctgtaaacggctgtgatgtatcatattctttcggtgcttttgtacttaattctggcgttaaattactgtcttgagatgttttccaagtaacctgttgttcttctttgctactatctctaggcgcttgatatgtctgtgctatagatgaatctgagacgccttttgacgttggatcagtaataacaccaatacctgtgagtagcgtgagaatagcacctataatcgcgctagcttgatttaattgagttgataaatctaatccgaataagtctgtaatttgcttgataaatagcaacaatgcaccaactaaacctgttaatactgctttatttttaaatctcaatttccagttaatatccatttgtttgctccttttacccaaaataaaaaacgactaaaaattagtcgtttaaaattattcgatggtcaaagtcggagatcctgaataaacatcacttatagtgacatacaaaatcccggaaggattactaaagttaatgcttttacttgcaactccactattgactcctgatattcctaaatcacttgatcctaaattagtttgagaaaccctcattataccgctgcgtacattttctattgtcacctgataatttttgttaggttcaactccatttattgtccattttgctgttgaatcttctatgctatccggatatttatttttaggtaagggtttaattacaaaagacggcggtttagaccaaacttttgtattacctgcaaatactttagagtattcaacccctttgtataccaatttctttacaccttttaaattagcttccatgtcatcaccctttaattaaatataacgtattcgggtctttttgatatatatagttatattcattttctgttcctgtccaaattttaaccgtcggttgagatgcgccttttagttgatataaattatccgcttgttgtttagtaaaagcttgagacgacaaaacatacctctcgtcatgattatgatttatgtctgattttcttgataaagcattttctaatccttcaatctgtttgattgtatgactatgatttttatctgcatacaaactgtttaatgtttgtttgaacctctcaaaatcttctgtactaacttttgagccaatctgttgcaatacactttctgaaatagagttgttttgtattgcttctgctaattctcttagtgtattcatagattcaggcgcgctatcaactagttcagcaatttttgaatccgtatacgttttagagtcgttgagagttgtatctttgattttttcaacttcttgcaatttattttctaacccttcaacatttgcgatattgattttgtccaataactcaggttctgctttgatatctgtatctttaccatcaatttgccacattttagtgtcaggattgattgatactacagtaccgtttttaccgggtgtgccttgttctccctttttacctgtatcacctttcgcaccaggttgtcccggttcgcctttatcacctttcgcacctttaaatctactttcattcttttcgatgtaagaaatgacatctttatctattttctctttaaagtctttgctcaataaatctgtcgcgttatcttttaaaattctcgtaatagcatcatctaccaatttaacatcgatttcttttgctacagcagattcaatgccactatcaacgatattgaaagaaaagttcgcgacatgtattttttcttcttctttctctaaaaacagcttacaacgaacataaccagcgtgtttgataacctttttaggtatcttgtaggtaaggaacccttttacaacatcgtcgataataaggggctcatttttgaatatagagccatcttccataaataaatgtaatctaggtgttaagccatgtgcttttagatcgatacgaccttgtttgtcattgatacctattcttatagatgctgtattttcatcttcagtgtaaaatcgacagccaatgtcacctaagtcaacaccatcattttttattctcgtttcaacatcttttattttgtacatttacacacctctttatttatatttatctcttataaagtagataccttttaagccgatttgtttatatagcttagcgattgtactagcttgatgttggcaccactctatagcagtagcgtattggtgcgtagctggattcttaggattccatctgattctgtacagtgtattctgccctttgttgatgtaatcctttcttacgaagctagcaccgcccatgattgcttttgctggagatgtccaacctttattccttgcaaacgtcattgcgtagttaggattgttgtcgtaagcgccaatgccgaagtagttgtatactccatcttttccgttagcgaagttacttgttccgtatccactttctaagaaagcgtgcgcgatcaaatagatttcgttaatgttgtttttcttacaggcttctgcaaatgctttgccttgtccgtctagcgttcctttccctttgagtatcttattaagcgcactaactgaaacgccttgatacttgcctaaattaagcatttgatagcattgtgtgttactttcccatattcgcttaacattcattgctgagctcgtttgtgctcgtgttgcattagcccagccccatgtatgagattttttcgggttacccctagacatttgtctatccagtgcttgctggaacgtgaacggacttttttcagtaacgatgcttggtttttcgtctgatgcagtgggtcctcttgttgacgcactgtcaaccgatgttttatcactaattcttattgttgtttttgtagttacttctttaatattttctcgttttaatatatctcgtttgatgtacgtctcaagcattttctttttgacttgctcatactttgcgtcatccggtataccttgcttaatcaagtcgtaattaattaaatctttcatactacgccaaatattagggtctacctttaacgttgtttcagataattctttatctgttcctgacaacaaccatacaccccgtattaaagcttgtatttggttcattaagaattgacgcttactatctgttcgaccaccacatacttcaataactagccaattagggtgacgcgggtcatcaaaattggttggtctagcaagccatgtagcctctctatcgacatataaatgcggtatttcataatcgcttataaacttatttctttgcgtatacagttcgtctacagaacgcatatgcattgattcttttatatataatccttgaatatctaagcgttcatcacccattacaactatatgatcaatgaaatgctcttctttatctaaaacattgctgtaagcagtgtattttactgttttaacttctttaaattgcggtttcttcgcttcgccagtaattgttgagtcattggcttttgatgctgaacttgtatcagtactactaggtttgctagtatcttttgaatatggaggtctcacaaagcctgtaacacttacataagggtgtcttactaaacttcccggagaacctgtccaactattagaattaacccagttttggtcaacgctataaaaataacttttattagatggtcctactactattgcggtgtgtccgtccgaacctattccgttgccagggtgccaaactgcgatgtctccaggttccggtacaaatccagatgaataacgatagaatcggaaacccttaggatatctgtaattagccatatccttagcattgccccatgttacaaaaccccaatatcttttaaaaataaagttaggtgtatcccaacattgactgccccgataattatctatattaatcctcttaccaatattcgactttgcccactccaccacttcgctagctgtaggctttctagtctttgggttaggtaatcccatgtatgcacctcatttcaatcaaaataaaaagccagtgccgaagcactgactcttaactgttatttacatttaccaaaccagaagcacgcccagaagctatatcctaaaatccctttaagcatggtaatcacctcctttaaataccaaaaatagttcttagtaaagctatgacaatcgtactgaagatagtccctatcaaaccgagaatccacattttcatatcgcgtatatttttgtcgttttctttcttatttttttcgtctatctgtctttccctctggatagcatctaaagttttatctaatttaatgttaacttgctcttgagttttttgacctaatttaatctcattgagagtgctaagcattgttttatcattctcttctaatcttctaattcgccattcatgttcgtgccgtttggtaaatccaaacattacgccacctactttgtgttaaattaaaaagcctcaagcattacacctgtgacttttcatcttttgcctctggatatttttcaccagtgatcaatgcatattcttctttgtcgattacacccatgtctacgtaccacttaatttggtcatttttatagcaaccccacacataaaaagttttaatgtccttgaaagttggataaatcatcttaattttctccatttaaacgtccccctcagtatttgttttgttagttttcagttcggtcaactgttgtgttaacatagcgttttgttgcgtcaattgcattgtcaacatgttcacttgcgtcatctgcatttgcatactcgcaaccattccgcgaagttcctcatcacttaaatctgacgcactttgttggtttgatgcattcggtacgtcttctttttcgaaattgctattgtatttaatttcgccgttagtgaaaacaaactttctaggttcgaactcttctttgaatttgataggcacattgttatcgtctacatctaaactattacgtaaaccgccagtattaacgaatccgataacttcgtttttatcgtttactgtgattttcattatttccaccccataattttagttatagtaactttgttggcattcgctccagaacctgatgttttacctaaatcaaagtacacatcgttatctattcttaaagtagtgctacttgttttggatagtaagcactcataaataccgccaccgttgccgtctgagtcaactacattcgctttactcaattgaatcgcgttaggtaatgcggttagtccgaatccctcaataacgccacctggataagttccacttaccaacaaaatagaatagtttgtgtacggttcagttagattgattgttgtacctacaccatttgcgccaccgtcgaacaataccgttgatttatgttcattaggaactgtccactgttgctcaagtctgccgtttgtgattgatcgtgtgtaaatctttttagagttataaggtgtgaagttaaatagcttgtttgtatcatctttaacgaataccgataaataaccctcataactttcaacgctacctggtaaatccggcactcttgttgcatagtaattaccagcagttaaatatcccaaatcgccttgcgcattatttaagttaacttgaattgattgaccattcgcctctgtcatcttatgttgttgccagctcgttgttccgaatttatcatctacatactgcttagcttgatttaaagcgttgttagacgtttcttcaacaaattgcttagttaagtttccatcattctttttataaaacgggtaccatgtgccgtagattttgtattttgtgtactcatcgtttgaatcgtctgggtaccatgttgcacgagcagtattattatcaacaacataaacaactaacacaccagatttgcttgatgtataagttgattcatcgaacgaagaaccgtcatcaacaccatcttgtccaggcttctctaacgtgcctatatccgtcttttctggcgcatctgttgcgttagtaatatgaataatcctagatgtgttaactgtgcttaaaacgctatctatggactgttcagacgattcaatcgctttgccataatcatcagtaatcttagacttttgccaattgactgtcgagttgcctttgacaaggtcagcaccattgatttgttgttcaacttcgttaacacgttcaaaaatcgcttgctctttatcaactattttatcgaattcagctgtaacagcttgtgttgcactagtttgcgtcgcagtaatagcttgtatagcttcgttttccttgatttcgatttgttgaatgccttttgtcgcactatcattcacttttgctattaacgtttgtgtatcagccatattttgctttaattggttaaagtctttaccgacagcttcgatagtatcttgaatagatttgatataaacaagctttgttataccatcaaacccactaactaaatcattttcaatattgaagctaaattgacgttcaacaacaacattattactcccgttttgtgtaaagaatgcctgagcatgcaccttgcctgaatgttttaaaaattcattcggtatcacatactgcaaacgcccattaattgcgtctactatcgttaattcgtctgaaatataagcgcctctatctacgttataatcatcggtttttaacacgatagatgttttaacatgttcagaacttatagataacggtctgttattcttagttactgcaaaatttaaaacaccagttcctctatctgattcatagaaactgatgtttgtgtcaataaccggattatattgtgatgttgtttgtaactcgattaagttatcatctttcgaaaaattatctactaccattattcaaccacctttccttcgaataaactccatttaccaacgccaccagtaccaaagtttctaactaaaaattgatgtgcagacgggaagttattacgtcttaatacttgtgttgtgttacctggtgtattcgattttacttctaatatccaacctgcaatacctttaaagtctttaggaaaatcagtaaatcgttttgattcttcagtagtgatatagaaatctaaaccaacgatttttaaatctgataattttgtaatactcttagggatatgttcccaataaccggcgttttgcggacagaaattccatgctccgttgtttttcttattgaaaatgtcaatgacacgttcgaatttaagcatatttctacctgtgctgtttctggtaagtacttgtcttagagcaccattatagtgtccaggcagtacatcaaagaaccaacctgcatctctaaacgctttcggtaacgggaaatctaacgcattttgtgtgtcttgcgtatagatatagtaatgaccaacttcggtaacatcacttagatatgctgggttttgcactggtaatggtttaacacgcccacctgaatcagtcatcgatacctgaggtgcaatgttttttaagaattggttaacacctctttggccgatagaataaattgagtgatgtctgttgttacctggtccaatagttaccccgattaaaagtgctttacgtcctgtttctagatcgtaatacatatctagaccctcagcctcttggaaatctcctttaaagttgttattcacaccgcctatatcgatacgacgtttaaataacaattctttcgttttgatatcaaagccttgtaagtaattaggattagccggattagaatcgccagtgtaccaatataagatacccgcatcataagcaataccttgcataggttgcgtacctgatgtgtattgcatagggatatccatttggtacagtactttgtctatacctttatcaatatcgtcagcacttcttacttcaacaaaatttaatgcgttcttagcttgttgttcagaagttttatattcacgtctaaaaaccattaagttttctataggattataaattgctgacgtatatctatcgttaaatacatttggcataacgtcttgcatttcgttgccatacgtcatttctccgcttctgtatttaaagcgtacaaacttgttattgttgttagcgtctaacactgctgaataaatccacaactcattgccgatatatctataggcgttgtgtgtgccgtgtccgccatttttaactagcagtctatcaataaattgtccgttaggcttcaatctagataacatgtaatgattgcctggacgcgcttgtgtcatgtaaataatttttgttctagggtctacccaaaatgattgcattactgcgttagtatatggcgataaatctgtgatgaattccggttcttgctcttttggttcaaatcggtattctgtcgcttgatattctttatagtgttcatctacagctttctcaacctttttagtgaaagcatctagtgttgaataatcatgatacaaacgatcttgcaatgtcttatgatcataaccagtattatcaacacgcgcgtcttttacctcgttgataccgtcgccgttatgacctattatcatgttgctaaaacggccatttaaatacgttaaataatcttcaacactgtcattcaagtatttaatttgtttcgctgagtgtgcgtatatttcttctttttgatgatatataaacatctcttcaagtttactcattccattatcaagtaatcgatagttgtactcatgctgagcaactactttttcgccagtgatagaatgcaaacttgttattaatccgtaagccattggttgcctcctttagtcgtaaaaactgtaataatccttgattaactcgtacataataacctcgtgacctttttcgttagggtgtaagccgtcctccatgctcgctttcctaaaagctggattgtatggcttaaagtagtctgtgtgatatgcgtcaaacactggtacgtccaactcgctacaagctagtatttgagcgttgacataatcctctaacgttaaccctagtttgtttttatccgtatctttacggcgtatcgttgtaccacgcataggacattgtctagtagctgtcattactagtatttttgaatccggattattcttccgtataacttcaattgcagaacaaaaggcaccataaaacgttttagtgtccgttttatcagtgcctatcggtacgcctgcccaataaccgtgtaaccagtcatcatcagtgccttgtaatatgattaagtcgcctcttatttgttccgcttgcctataaatactattttcaacgttgtttgtatctgtaacagttgctatagttgcgccaccttttgcaaggttggtcgttttagcttttaatttcttgcctaacatttctgtgaaattagtttttgcatgcgaccctctagctacagaatcgccaatcgttccaatagatttgatatttcttatacttgattgactcgtaaagtcgtacatgatcgtgccattcgcagttgtaactgttttagtactcatcttatcgacttttgcgtttattttttcattctgcttaactaattcgttatttatagataaactagcgttaactttagcgtttagttctctcaagtacttagctgggtctgacttagttgtttttacattcttaacatagttcgtagcttcatggatagcttttctatatctgtcacgcattgtaaaatcgcctaatactacatcttgtttaataatgttattgtacgcatctctatgtgtagtgatttcgactattctcactaaatcgttatagcctatagttggttcagctactcttacaatatcgccaattctagggttagcctctggaaaatgctcaggctgtgctacgaagtccaaagaaatagaagcagtgacacttttctttatcactagctccattgattttttcaaaacatcttctttttttatgcgtccatctattaacggaggcgcttcccttttaccaatcagttgtgctaatgggtgtgtgaattcgaattgtaacccagcctctgtaaaagtttgctgaccgtcaaagtcgccataacctcttatatatgtgtagcatttagaagcatcttcttgaattttgacgttatcagcatttacacctgatttaatatagtagtttgctacttttgataattcgtcatacaagtgaaatgtttttgttttagcgtcgtactcatattcgagatgatagcgttcaagtccttttttgaatatctcaagtcttgtgtctcccttgcctaatccctcgaactttgatgcgtcaaccttagtgtgcaatacgtacttataactagttcctttaaatacagtgttaaaaaactctacgcctgtgaaactttcgttatattcttggtaaatcctagaattgtttagatcatctaattctttttgtctcgctttgatactaagtttgattttgtttccgattgttgatttatcaagcattactattacatattcgttgaggtcatcttccccctttacgtttgtgatagtccacatctttgtaatagcgccgattgcgtcgaaagtgctggcattttctatcatatcaatgtctaacgtgctatcttcattcaatttttcgtttaattttgtattaacatgaatcgcatgaccgacgccttgcaaactttttaataataccggcatatgctactccttatctgtaatataatttgtgtctaaagactatctttttcataagtctgttggctttaaaatgattccaaccgggatacaacaccggttgttctaacgttttgttgtataggtcaatatttaaattgcctctatatgtgtgcttgttatcaaaaatgattttatcgcctgcttttaaatcgacatctttaattactgagatgtttcctttatccgtatagaaagtgaaaccgtctttatcatcagctttaacatcttcggctaattcaatttcaactacattgaattggttgaactgtgttaatgctacatctccgttgtaataaacatctccagaactcgtgttatagaatgtcatttgtctacttctatcattttcatttagtgctattctgtccggaactgaccatttttctaaatcgttatcactttctaaatcagtgctatagccaatactttcaaagaaaggcaattcagtcgtctcaaaagtcaacgtgatttctcctgatgtcttagttgtgtcaaaagatacttcgctaactaatccaacgaatagttgtctaccgtcaacataatctaattcaaattcttgttctaatggttcgaacatattttcaaatttgatagtgttatccggcgtcgccaattctcttaggtaaaagcgaccataaaacaatgtttgaatgtctgatttaagatgtgaggcataagcaatcttaggtacttcatacctcaatcttaattcaacttttttatattcttctttagcgtaattgtgaaaacgtccatcaactccatctaaaggcgaataattccttttgtaacccgaaccgataacattgtaatcaagcactcttaagtgtttgtaagtgtgaggattgtcactgacgcgatacttcacaccatttttaataatttctacatcatgggctatcaataaacaaacctcccttacattaagttgaaactaccatcttttgcatccatatcgtcaatgtgagatttaatcatgtttagatcgccctcgtttctaacagttacattaacaataggtctgttattttctttcatgctatgttgcacatcgtttgtcatatggccgtcaacgcttggtgttaaactgtcgttgaatccatctgtcaacgttgaacctaactcacttgtgaacgttttaccgaagctagtagccattactttagcttgtgataccgctaaacctttacctaaaccactacctccaccatgtccacttacgaatgaagttactgagtcccacgctgatgaaatcgcatcgcctaccgcgcttactactttgtgcgcagcgttagctacaccttctgccactttgccgattaattccgctccggcatttaaaaaatcgctgaaaaagcttttaatcttatcaagcgcgtttttcatgccgtcgcctacatttgagacaactcttttaaatccatcagctactttacttgcgaaacttgtaacagtattccaaatattagaaacccattcagaaccttttgtgataataaagtttagtgcttgtcccattttttcggccacactcgaagcaacacgactaaaccaacttgtaacactgttccaaatactgctaacaaaattagtgattgtactccatatctgtgaccaacttgtaccaaacatagaaagtgttcgattcattacgccagttaaaaagccgatgattgactcccaaactgattgcatgtattgccaaatcgtatcaagtacattggtaaccgtagttttaatagtctcccaagcacccgagaagtcgccagtaagcaactgaattaaagcagtgaacaaaccaactatgatttggactgccacggatatcactgttcctatggcttggaacgcaattgtaattaacgtccacaaaccttgtatgatattcataacgtttgtgatgatacctattaccaaaacacctaaaacttgcatgaatatttgtcctaatacttgtaatataggcattatcggttgtaaggtagattggattttgccccacaattcagttaaccagccaactacaccttgaatcgcaccagaaaccgccgttttaacaccgttccacgcttcagtaatagtgtttctgaaattctcgtttgttttccataaataaactaggacaccgataaatgcgccaattactgcaattaccgctaaaataggtgctgaaatcgaaccgaaaacacccattaacaattgcatagctccagtaactagacttgatgttctaacaaaacttaaaatctgttcgatgacgccaaataagctcaaaccaaacacatttgtaagcacactacttatagcaacaatcggagccattaaagcccaaaatacaccgcctaaaatacccataacgccagcaacttgtgctatagctgggtgtgtctcgaatagtttagcgataaatccagctagattagtgatgaaatctaacaacttactagctataggagccattgcagtgccaaatgctactaatgcttttatgatgttaccgattaattgcataatagtaggaccattctcttgaacgtaacttataaagtctttgaacccttgtgattgtcctacttgttctgaccatgctctaaattgagaagttaatttaactaaccagtcaaaaatgttagaactgttttgagcaaaagcaatcattaaattaccaataccagcgaacacattgccaaatatctgaccaatcttaggtaagttagtggtagtgtagtcaataaacgctttaatagcattctgaccagccacactattagcccaattttggaaagctatagacatgttctgtagtccttgagacgcaaatttgaacaacggcattaattgagtgaaaatgttaattaatccgtcgccaaatcgtcctgcagcgttcaataaatctccgaagattgcgccacctatgctattcaatgcttcaaatgctttcttagctgtttcagaatgtttaacccaatcctcaaacttgcgtgcgtttgcttcaaccagcatagatacttcggataagaatggttttaattgagacatcgcacttgtaacgcctctgatacccgctgacatcgcattaaagatacttgcttgattctcttttacaatgccttgccatgtagtttttaactgatcgctcgcatctctaaaattttgaacttcttttgttactgctaacgttccatcttttaccatttttagtgcagtaatagccattgcaccgaagccaaccgctccaacaccagctacagagaatgcaccagctagcccaataacaccaccacctaatacaccaacggcattaagtactgccataattgccggaactaatccagcaattactggtattaatgcttgtatactagcaatcattaaacctttgacttgttgcgcaaagatagtaccgaaagttctaatatttgatgcgatgccatccattgttgattgatactgatctaatgctcttttacctgcagtcaatgctacttgcattttcgacattccggttgtatcaaaatctaatttaacagtgtgtttgcgccaaccagctaacatcgctttagaagtcgcaacatttctttttaatccgcttgcgtcgccgtcgatttcaacttttttacgtctgatattcgatagttctgctttaacaaacgatatgacttgttttactttgctagcgtctgcatcgatattaactttatgttctcgccaacgttgagccatcgatttagctcgcgttagctctctttggtagtctcttatgtttgctgtaacttctgtcttgatttcgtccggtatatcagttttagccatacgttgagcagttctaatattccttttaaaatcactgattatagctgtaacacgagccagaaaattcttttccatgcctaacctcctttatgacttgtttttaagctgttaaggaacttgcgagtcccttgtttttgtatttctcttttacgtttgtttttagctagctcacgctgtttcattctttcgtattcatcttcttgaccacgaataatgtaatgttctctttcgttctgcctaacaaaacgttttagtgatttaccagcttgagcaaccgcattatattgagcgccgtacaacgcaatgtctctttggtcaatcaatgcttgtctagcgccaataatccagtcattccattcggcaggtagcatgctcattagctcgtcattactcatataacctatgtaacgacttgtcatctgccttatttccgaatagtctaataaggtgctacggtcatgatttctttgtagttgttcttcatcatctcgataccagctttcgcgccctctttctcgtcttctttggctaacgatggcgcttggttcatctgtgtccagaatagacgtgatttctgcttgaaaaaaccgctattattcattacgtccaacgcaccctgtaatagatttaacgtgtcgttttctctttcgatgatttccatgatttccgcttcaatgtcttctcttttaggtgcacttttacctagataagctgttgcgcattcccaaaagtctacaattgccactgtgtcacgttctaataaagcattgtaaacattagtaaatcctgaaatcgtttgttttctgcctttattatcttcttgttcagttgcaaactttttagcggttttatcgaacataaatgttgcttttgctttcacttcttcattgttaattgttaatgatgtaattggattaaaagttgtttcagtcatattaaatacctcgtttatcgttattttgtacaaaaaaatagagggctaatgccctcgttaattacatacttaaatcgctactgccagcagttgtttttttagttcggttttcataactatcttcataagcgttcatgtcttcgaattcaacaactggagccaatgcgctagggttaagccattcttttggtaaatcattgattgtaccgtctgcactattgaacttaactttcgctgtgatttcgattttgttatcttcatcatcaaatgaccattcgtgctcttcgataactacatatgcgaatacaccgtgatgtttgccatcgcgttttttcgtttcccaaatccaaacacgtaactgtttgaattgtttaactgattcttttaatgctaattgacctttatctcccggaacgacatcaagcgtcaacttgatttcttcttcgacagagttacggctataatcttttttaccgccttgaatgatttcagcaaggtcattactgatagtatgtccaccctctgctaaactacctaaaagcgttgcttcttcgatagttagcttcttagctaaatccttatcagcgatttggagagcgacaatatatttatcctgcgccattcgttacactcctttgtaatgtgttatgtctgtatttaaaaacaagccgaatgataccgtgtttagtgtactgatctatgtcagtaatcacttcttgtgtatcaattcgacttttaatgaatgaataataatcaatttctatttcgttatttaaaacgaagcctaaaaattgaattatttgtgatgcctcatctctattacgtgcttgactataaacatgcaacgtgatgccgacatcttcgaccatgctcgtggtcgtttctttgttagtgacgtttgtttcacccacaacgatatatgggtaaacagcgtctttctgaacgcaatcaaaaaccctaccgtccaattgtttttggataataaggttactttttaatttgttatatactttgttaaataagtaccgttcaactgatacccacatatcttaaccacctcatgaaaaatacttattaaagaatgctcgtccagcgtctattgccggctcccaaaaaggttgagcatgttgtcctttagtagtgtgccacttaccgtttgcatctttgtatgaccacggtatctttttggctctactacctccagcacctgttgcatatataccagtaccataattgacatatattgcgtattcactaccaatattaataacaccagtaaaaccgctgtctttaaagtccattgttacactttctctaagatatccggtatcaactggcattaatgaaatgattgtattgtgaatcttagcagttgtctttgctatacctcgtttgacccatcgctccatgtctcgctcgtaattttccaactcttttactaagtcccaattaccatacttaacctttgccaataggtcgcaccctcaatctagttaaattgatttcatgttgtccgccttggtcgaccggttcgcctacaacttcgtacgttttaccctcgtaattaaataaagttttgtttgttattggtatgtggtacggcgtatataggtttcggtcaaagtctttgctcatctgatgaaatttgagtgtctcacttgatgtaggtgtgtccataaaccctttaattgtttcgttacttttaaaacgctcgtattctttgggatatgttcctacgacttcaacctctccaatttcaattgtgtgcggaaactcatcaaacggattaaacatatcgcttgccccagcttaatttacgataaggtaataaatatgcataagcactactaggtatgtcagttacataggtataactcacagtgcccatcgtgcgtgctgagatattgccggttgtaccaaacttgatacattcagcaataaacttcttaacacccgacggcacttctttgtcatcaaacttctgattacaataatcttctgcaacacttttatattcttcaataagataatcgatttgctcatcgttagacgaatcattgagtgaaagtccattaatcattttgacgtcttttgcgtccattacttaacaccctctaaaactttgataagctcgtcttttttcatatcactataccctttaatttcacgctttttagcaagttcttttaattctgatactttcatatcagataaacttttttgctcgtcagcgctcgcctcagactgttctacttgcttgtcttcaacaagtttaatagcgattaaattacggcggttgtttgttgtagataattcagtgaatcgttcttctgacacttctaatccatcacgtgggtaagtgtctcccacttgatattcatgtccgttgtcttgtgcatcttcaaaacgttcgattactttatacatacgtcactacctcccattacatttctaagcttccagaacctttagtgattttcactgctttagattcatcatataaataagctacatagtgcttatcactgtataatgcagttgtttttgttgatgcgtcacgcgctacttctaagaagaaatcacgtttcaagattaatttaactgcaccttttttagctagaatagctgtgccggcttctaacttgttagtacgtacaatgatagcgcctagagcttcgccaaacgcacctttaacgatgatgtcatcgcctaattcggttgcacgcgtaaagttagttgatgcatctccacgtaatttaccagcatcaagtggattgataaataaaaccattggttctaagtcttcatcgttaaatttgtcgattgctgattgtaagccgtttaatttagtgatgtccgcattaacagtaagtttagctcccattaaagcctctaatacgtcattatcaactttgttagcgtgtgccaaaccatgttgacgtacttgttcgccttgtgggtctccataaccacttaataaagcctcatctgtgatagatgtacctttagcaattttacggattttagcctcacgttttttagtttctaagatatcagttgggattttttctccctctgcaactacttgtgcatctccgctataaacgaatgctgggaatgtcaaagtgtctcccggttgtccttgtaatgtgctatctacttctgcaaatgaagcgaaacgcaatttcttttcgagttgcgcttgcatcataggcgctaatacttctggaatgatttgattacttgttttagtaattccttgtggcatacttatacctctctctttgtttaattttgattaactaatttttcgaatgtctcacgatcgttcaaatacaattcgttacgttcagcgacactcatgttgtcaaacctttctttcgttacacctgagtccggattgcctccgccttgtggtgttttacctacaggcttagacgacgcaaataaataaggtttagactctttaagcgttttaatcgcttcatctaaaccttttacagtgccgtcgtctactaattccagttcatctttattgatgaatgctagaatgtcgttagcgtcatttgcttctttagcaaccgctaacttaactgcgttattaagttgtgtttctttatactttgtctcccactctgaattttgattctttaattcttcgagttctttttgaatctcgctatcatctttaacagagtcttgcaatttgacaatttgtttatcacgtttagaaatctcttcttttaactcttcaatttcggtattcttgtcgttcaatcttgaacgtggtaccattcccgattttgattcgtcaatcgcatcaattactttctgcttatcgatttctccgtctttaaattgtcctaacaatgtgtataaatccatttaaactactcctttttacgagttttacgtgcaacgccacgaagaattttggtataaaaagaagcagtttaacgacatgctaaggtcgagtagtaaactactttcttttacgtttatatttctcccactcacgataagtcatttgtggtattacttcggttgtgccatcatctttacgcactctcgttgtactaggcaaatcatcttcatcaatgtaatacataagcttacaacgacagttgatgttttcttttgcactattcacaccaacaaacaacttaggcgcctgtccaacgcaaccgctcgacttgaacggttcgtctattttcttcttagcaccgtctagatgtctgtgtgtgtctcttgtacgtgtatctttagtagcttgccaatacttatacatctgtaagccattcttttgagctaccaatgcactatcgagtccagcttgagacatcgctctgcccgcttctgtacgagctacacgcaacgattgagctttagacataccaatatcatcacggattgctttcgctattttagagtagccctctccgctcataatgccttgtgtgatatgtaagcgtatctttttcagtacttcatcacgatgcttctgtagtgtcggtactaatcgaatgaactcaataagttgttcaatagccgatgtgataacttctttgctaggaacatcaaattgcatagatgtttgacttgccgtctcgtataaataaaggctcataaggaacttttctatataagcgtcttcctgcgacttctgaaccatcttagctacttgcctatagtcatcagtcaacattgtacctatacgagttaactccttattgagcctgttatatttattaaattcagtccatgtaacatacacatcatcactttgatacttctcaaacatatctgcgatgatttgttttatctctttaagtcgattagcaaatagttgttctataggcttctcagctttagagattagactgtcgatatactcatcaatatcattctgattctttattgttagatctttcttgttgttgggcaccgtcagcacctccgtcatctaaattaggcagttgcttgttgtactccatttgttcttgttctattcgttcgagttctgcttgcaaatcttcgacaaacgggtgattttctaatactgtttcatggcttacaattcccatagattgttgagctgtttgtacttgtaattctgtgttcgctactttgttgtagttgaaactaatatcgacatctttatgttctcctttgatatcgaagtgctcaaacacaaaccaaagcaactcctgtatagcaactttagctttgcgcgctaacttatctgctttcaagtttaagttagtatataaaaactccaacgcaaccccacttggagccgaaccgaatttgtcagaactaaagtcaaccgcttgaccaaacaacattattttttgatataactcatctaaatactttttactgttttcaactggtacttctacctgtattgtgtcgacacccccgttatccgatacttttatcgccccgtaataacgtagtaaccgtttgaattctggcaacttttggtcatcatagttcgttaatacatacgttaattcgtttgaatctttaaaagtattggacaaatcggataatcgcctgttataagcatcaatcaatgttttatacataaatatatctgatatttctaaatcgttatttttgaatggaataaatggaatcttaccccatgaccctgtactaaaatgcgtttttgaattctccaaattgttagagtaatccggaataagcgagccgttttcataaacgtagtaattaacagttactttatcccagtattcaactttagtttcattttccaatttatacatcctgataaacgcctctaattcttcgtgctctttatcagtccatataggaataccttgttccgccggtactctaaatagcttaaattctccctcttcatcaaggtaagggtgcaaccattcaatacctttattgctagctcctgttagtacactgtgtaacttatcatcaaatctattacctaaaacttcatcaatacgtttaactacttcatcatctgtatgtttaaaagcgataggcttccctacaatataagaaactttttgatctactaggttagcatggaagttggtaatcattctgtcatctggtttcaatgggtcaactgctcctgtagcatcaaccggcttgggttccttaacaatatcagggcgttgctcataatattcttgacctattgagatttcaggtaacttctccaaatgttgttttatatatctgacaatcatttcttctagtgtttctggcttattgttagtcctcacaatagcatcaaatatttctgtttgtgttggttggctagggtacaaaatattacctcctttaattaaagcctgtgccacttggcttattagctgtataaactgcatatcttaacgcatctaatgtgtcatcgtttaatttaactggttcgtctgcattatctttccaaacgtagttgtatatttcttctttaaacaaactaactttttctttgataatgaatattttatttaacttgaataacctagaaataacttcaatgccagcaataacggctttgtcagcatatcttgcttttatcttctctcttctaaatcgttcaatatgttcaggtctagctgtatcacaataaaaaagaatatcgccatgcctttttataactcctttagcaatagctacccagtcatctatctctttatgtctgtgtgcgtgttcttcaataacgtacttgtttccgtcaaagtcttccgctacaaccataatagaaccataatgctcatatccccagtcgacgcctgcatatttcctttttatttgtttagttttaaattcttcttctttgatgtaatgaactttttctttgaaatctttatatacaacaccttcagcagaaacccacttaccataaatatcacgatctgtgaacattcctgttggtgtacttgcgataatcgattcaatatattcttcatctaaaaatgtattgtcaaacaaagtaaattggaatgctttgatatttagtcttccattcgataaccgttgaccactcttatcaatgtaatcttttttaactggatgcatcgggttttcggggttggtatcaattaatatcctcgcgcctttgtaactacaacgtgagaatacctctttaataaacatattgtgtaatgctgtcccctcgtttaaaaaagcacctgctgaagtaaaaccacgtgcttttttccatgcatccgagttttgtccgtcgaatacatacactttattaccaaatattttgactgcgttagatttatcaagtgtcaactctctacctagtattaactccatatcatctagtatgttacgtctgatagatgcttgtgtcgctcctccgataatgaagttaagccccttgtctttataagtagctatgtgcattaaaaaaagcaggataaatacatatgttttacctgccctcttcgcaccactcgctattaatactttgggtttatcgtttatgaagcagttccagacttcttgttgtttcgggtttaacatttcattaatcatcattaacacccgctaacttaataagtgctttagcaacttctgcttcttgtgaattattttctgatttatccatttgatcgatttttttctcaagcatcttgatttcagtttcaatctttttattagtcagaacttcattgcctaacgtcattctattcatgccgtccaaactagcgaggaatgcatcagctgtcgctttcttcactccctctatttcaatatcgttcttcgctgtattctttagccactcatactcttcaaaagccttttggcgtgtccattttgattgctcagctacttcttgacgaagttcttcgtaccttattaaaaccttattatttttagctaccgtgctcgcttgcatgtctatatatgattcacttttacctttggtcgaataccctgcgtcaatataagctttgcgttggctcttgccctcgatgagtcccaatacaaacttttcttgcttcggtgttaatttaatcaattgttttcactgtatcacacgcctttacgttaattactctagttatttaaatacaaaaatgcccctacatcttgtgcaggagctacgttcaataaatgtgaaaggaggaaaatagttatgactcaaattgcaagaattaaactacccaccatataggcaggtagtaagtgattaatagcgtaacatatcaactttacatgtttgtcacttctcaatcacatcgatgagaacatctaatgtggctattaccccacgtcttaagataattcttacaaatcaattatataaaattaattcacagtttaaaaatagtgtcattttcgtcatttctgtcatttttgtcattttcgtcactgtagtagataaatcttttctgctaactcatcacggcgcgctaagaagttgtttctgttcaatttagagttaggcatcttcttgataattgcatctctgttataacctttcttcaacaactctaagaagcaaaagtcaacgtgtcctaatctctgttgtgattgatttataaactcaacttcttttaacatctgcgcataccttttatttgctctttcaagcctcacaacaacatcttcaactttgcttgagttttccccttgtggtttcggtaacgtcgcttgtataccatactgtgcgattgaattgctatcatattccggtattacatcagctaatacattacacttcattttatgtgtgcctatcatattaacaattgactctttgctatacatctactctgacacctccgccctcatcaaatcacactgatcgcccaactttgcgaagtcactcggcgcctctacatcatcattagccgtcatcataatatatacttgctcagttacatacttacctagctcatacattgctagtaagaataatagtcttaatatttgtttaatcattgttgtcatctcctgtatcaatcaaaaaaagtacctgtctcaacatactctttaactgttgttcatttagactggctaacatagggctgtaaaattcactatcttcatctttaacagttttaataaaacagccttcaatctcagctttttcttctggcgttccatttttatacgtcttaaatacctcggtgtgcttttctggtaatttcattttaggtgtattaaacattattatctcccctctttaatgattttatttcttttcgaacaaagaacctaatacttcttcactaggtctttcgaataaggtcactttaaaattattagtgtagtaaacaataggtgtattttgtgactcatatttctctttcgcttcttctttactctctgcctcaacaactgtaaacctttgattgctcttagctttagttatgtgtgtatgcttgcgtcctgttgaatctttgaatgttgtgactaagtattgtgtcacttccccaaaacctccttgactcgatctaagatgtctttacactccgctacttccgaagcctttttgctccacgttctgaaacactctcgaattcctccacttgctttagttcaggtgtccatataggcacaataaccaattgagctagtttgtcgcctttgtttatgacataactaccattcatacataaaaatttatctgttacaggtagtcgggcatactttccatctatctcagcaggactccgaccaaggttactcatatcctcactctctaacgtttcattatcattcttgatattaatccctaaattaccatgatatcccgcgtctattttgcctgtttcaatcactaaatgcgttttactgcttacaccactacggctagttaatagcccgacatagccctctggaatgcttacagctacatctgttttaatcactgccttttcttgtggctcaagtaggacagtttcagctgagaatatgtcataacctgcatccgtcttatgatttcgttcgggcattctagcattttctgataatagttttacttgtaatgtgttattcattttcctgctcctcctcatatttatagacaacttgacctgccataatccctactgcttcatcaagttcaataccttctttaactgaatgttgaatagcatttgtcattccctcaagtatttcatcaaacgcttgtgctctcttatacacgtcctcaatctcttttaacaatccctctgtgtcattgccgttatacgcactagcacttataactgattgttcgatttgttcgcggttatccatttgtgtcatcctccataaaaattttattgtttaattccattccgaatttaactctttcatcatcgttaccgaattcgtttattaaatctttttcaacgctcttgcaatacctatcccatgcgcttgctttcttctccagttctttgttacaatctcgtaacttcgctatatccccaataagctcatctcgttgcttcttgtactcttcacgatcttttaatgctttgtgaagtttatctaataacttgttagagttagtacaaagatttttatattgttcatctgataaggtgaacgtcatctcataacctccaatagcatctcattttcaaaaatatttccaacaatttcaataatatcgtcattttcacttagtaattcagttacattgctaaaagttatataaaaggctccttctttaaactcgataaaacttacttctctcgaataacaatcttgaacaatatccccttcataaatctccacaccgtgcacatctttaaatcctgtgtattgtaatagttttacttcattgaaacttttataacctgttgaaatcaaaatgtacccactattaaaatcgatttcgtcaataatactcataacttttttatctttatcccaagctttaaatttcaacatcatactagcaactccccatctttccagattaacgtcatagttaggtcgtcgtttaagatatagtatgctttagtaggaaaaaaattgtcgtcttcaaaacgttcgttcaaactgatacctttgtgtaataaggatttatagactccttcttgaatctcatatacctctaacaacctatcaaacttagtctcttccgttacttctttttcaatatcaactatgaaggggatatcaattggaataaaacttgacgtcgaacacttatttgtatttggatgaaaacgaacgaatccatcactaaatcctgttgaaaaaaatatttttccttgtgatagatccggattttctcgcgcccacttaattaattcatctagtctcatttcttttttactttgattttcatttttacatctccttaaaataaagttagttgcttctgttcctcatattccaaaccatgttgctttatatatatttcgagctcttccgctgtatcaaatgtctttttcacgccttgccaacctggtacgatatgcccatgaaagtaataagtgccgtttactacatggatatgagccactcgctcgttatcctgatacagatatctcttagagccgaaaaaatgttttaagtattctttacgtccgctatctgtcatggtcatcactcccacaagtcaaatactctatcgacgtaaaacttcgcctttgctaaatcctcatgaccattctttaacggtgctctagacaagtatttaattgcattacctattgcgaatgctaattgtggtgggtactgtgccgtaacctgttcgataaaatctataatttcaatgtcgccgtatgtgtagtgcgctggttgcttaacattgtcttgcgcttcgtccatatctacttttctgttactgattacgctcattatgcttcactccatttcttgaacatttggttataagtgacatcgaaccagtacggatcacgtgaatgtttttgtggcgttccatcataaagccatggtcttaatcttctctttctttcctgttcatattccgctctcacattttgttggtatcggttcaaaatcgctttttttctgattttttctctccctttttcttcatcttttatttgactcttcatatattcaacttcttctttagattttgagtcctttcttccacacaataattcatcgccgcgcattttatgtttgtatctatatctaagaagttctggagatatatgatatttttctgaaacttctctcaatgtcattagttttcctttaatacgcactcttataacttttcttctagccatcattccacctctaaatctaaaaccttgatatttataacgttatattttaatagttcacctggattattaaataaatagtccgccaaattttctttttctttatcaatctgattgtaattaacactttcgacttctgtaggaattctaatgtcaacagaagcattgatataagcttgatgttgcatgcaatcacactcctaatccttcatataaaacggagaagtaaacccgtcactattcaaattcaatccttttgcccaatcaacaggcttattcatgatagtttcgatttccttaagtccatttgaacctctaggtatttctacaattacttcatcatggacatggccaactattttaaaacctaatgcttcaagccttgctatagaaatcgcaagtaaatcccttgcagttgcttgaacaatattctcgactaacttcccaccatacgtttttaactttgaccatttacggttaagatctaaccccataaattcaacaacttgactaccccaactattttcaccaactaaagcttttggataagctaaagctcttccactaggcagttcaatcattagaaaaccttttttcatataaaatctaagtccatgtgtatgatgcgtctttcgggattttacagtattaattgcagcctcttggcaagccttccaaaaattaactatgttaggatttgcgttacgccaactatcaactaaaccttgtaactcgttttcttcaatgcccatttccaatgcacccattgcttttaaagctccagcgccaccttgatagcctaaagctaattcggacacttttcctttttgtctgagaggatcgcctttagttatgctttctaccggtacattaaacatttgagaagccgatgcttcatatatctttccgtgtgtgttgaatacatctaaacgccattgttcttttgcataccatgctatgactcttgcctctattgcagaaaaatcacttactgctagttcattaccttcttcagcagtaaatgtcgtcctaactaattgacttaataagtcttgaggatgaacattgagtaataaatctaaatcatcaaaacgttgttctttaataagatctcttgctatttctaattcagtatctgaaatataatgctttgttaaattctgaagttgtacacctctacctgcccatcttccagtaccggcaccgtaaaattgaaacagacctcttacccgttcatcactgcacatcatgtcatgcattttgttgtattttttcacactggttttagacatttgcaatctaatttctagcatttttttagcttttcctgttgcttcttttaagtactcctgaaccgttttcttttgtaaattaggtatatctaatccttgttcatcctttaaccaagccaataactgtgtaggactattaggattttctaaacctgttatatgtttagcttgtttaagcaattcttctttactctgcttatcgagcacattagctcctaacatcaatgatttagaaagcttaatacctctgtcgtttatatgttggtcaaaaacccaatatgtttgttcaattgcagttactggaaagtctttaattttattagcaatcgccatttctacttctacatctcgaatacagtaatctataaattgttgccatttttcaagatcatgttcaggtaggtttcttgttcttcctccattaacttttgttggtttacaaggtatagagaaataacgaattaaatttttacctgctttatctttttggctttgtagtcttaaaacttctccaactttatcaagcgaagcaggtaagccaatacgcattgaattaaccattgtgcaaatccattcttcaggtggcatctgtttattaaaatgtttagcaagacaagttctttcgaaattagcattgaatgcatacttttttacagcagggtcaaatagagcaattttaaacgtctcataatcagcgtggaaaggctcattatctactttagtcatgtcaatcgcactaatcgctccaccatctatcgaataagctataattaaaatttcgaaatcttcagcttctgtgtatttataggcaccacatttcgaaatatcgttactgctgtatgtttcaatatctatattcataaatttcaaattcttgacacctcaatttctttaaaattaaagtggggctaaaaaccccacctattgacttataagaaatcctcatcatcagtgtctaattcatcaaaatcatcttctgctgcacttgcaccgccaagaggttcgcctttttctacaagttgaatgttgttcaatccaactgcgatacccttattaccatttgtgttgaatggaaataaattgattgaagctctaatatagtcaccacttacaatagttccagaatccgttaatctaattttgttttggtcaataataccaggtgcttgtttgcttgatgcgttaataaaataagcgtcttgataattcacatcatcttctctttcagtatctccatcacgtaatggaagtttcagatttgcaggaactttgcctccaaacttactaacttttccttcttctttagcagcttctatagcttgttcaatggcttttatcgtacttgtatctgatttaggaatgattaaactgattgaatactttgcttcttgcccttcttgcatactgtgaggttcaaaaatatgtgcatatgatgctcttacttttcctgtaatcactttagttttatttaatacttttgctttcatgtttatataccgtcctttttaatttttatagtttgtcaaaatcatcttcagcagattgctttatagctggtcgtttatcagactcggtagcaagtgttaatttaccttgtggcttttctataaagccctctgtaattttagaaaatgcttttttaccaattaatttttctaatttcgtaatgctaagtaacttggtttctgtaatatcttcaggtttataacccgcttcaactaacttttcaagcgttgcttttgtatcagttatcattcttcgcgaacgaccttctacaagcttccaaccaggatagtttttatcatttcctttcgcttgatctagcgcataatgttctacttcatcagcccattttttgatatcaggcagtttatataaaagttctgcaatctcttcatcacttaacaaatgtggtggcttttgaggcacattttgcatgtattctgcacgtgttctacatgaatgctttatcttacagaatctacaatgactacctgctttaaactcaccttcaccgttataagcaagtctggctaatggtttaacaaaatcggttccccattgaagtaatcttgatattggtaactcttcagtagaaaagttatctattcgtggttgtatgatagtcatgcgaactgtatgaatgtcatacattaaactaagcagttcatatgcgcccaagccatataatctaagttgaggattatctatagctgaaacttcaatgcctttaccgtatttaaggtcaataatttcaagtacaccacctgaaaatataatgacatcaccagtaccaaaagattcagggacgtatttacctaaatccaattttgtttcaaataaagctattacatcattatccctactcaaagcttcgttatatttttcttctacattagctacatactcttcaacatattcacgcaactcttcactgtaatattgatttcgcttataattttgaaaagctttattaaactcaaactgtgttaggccttcatatttaagactgaaatataactcacttaattcatgggcgaatgtaccttcttcagcaaaaactgaacttttatctgcaataccttcacttgccttaatactcggtgggcagtttagccattgtttcgcaccacttgcacttagctttgcatgagctctatttgagtgatctagcttcatgcattaattctcgcttccatgaaatcaacaattttttcataatgttcttctttgatagtagatagcttatccgcaccaagttcgttaagtttatttctaaattctttcttatcagaagtatctgcttttttaaggaactcttttcctactgataaaacataatctttagttaaatcagcagaagtttccttaacttcttcaactgattccagttgagctgtttcatcttttggcattggtgcttctttaactttctcttgtacaattgatgaatctacagttgatagttcagtatttagcacacgtaaattcttatttaatagttttaattcttcaaaaataccttctaatattgccattgattaactcctccttaaaattggttggctaaacgaatcattaacttgatgcgttcttctatttctctagggtcatcactttgttcgtttaatcttgccaataactcgaattgttcttctaatatctctttcttacgttctacaacagttaaatgtaactgcggttcaacaacacgccagataccccaactttccaattcaatctttccttttttcttaagtcttgaaagtgtggattttgcatgtgttttcgatactccaaaaacttcaacaacatcatcagaattgaaattgtcatatgttgcaaaatgtgatagtattttttgttgtaaggtcatattaataactccttatataattatttaagacaattgctcatcttgcactgttacttgctccaacaagtagcagtttctttattcttcataaaagtattccttataaaatatgaatgttgcgatacttgcgaatcccgcaattgaccatgctgtagtgaagtatagaaacggcatgagtacaatcgctaagaccgtgaagcacaacactgctaataggtagcttttatatgtgtcgctcatttgataatcctcctaataccattttttatgctttctgatcaaatactcttctaatttagaaatattaatcaatgttcccgttgctgaataatcaatgtataaattttctacacctaaattatcttcacggtaatatttcaaccagttgtatactgtacttctacatactccaaacaattgatggatttgtgtaggtgttgcgtataactttttcacaaatttttcttcgcctcgatatgtgttttctggtgttggtggtattatgatttttggcatctctatcactcctttagataaatgttaaagtttgttattattcgccctgtattgaagttctctatctaatgcatagaaaactttgtttatttctaagtagctgtaatcactttttttaataagctctaatatttccgctcctaagttacgttccttttccgttaaataggatgaagaagcatcagctttgctagaaacttgtgggacgcctatacgcaatccttctgatcttgtgttcatttgtttatgctcctttcgtgtataatgttgttatcaacctaaggaggtgataacatgcccttgatatctgatgaatttgatacacttactaaagaccaacaatatatcttgtccgtactctacaaagattatttagaatgtgtaaagttaggttcggttaaattaacctgcaataattttggaagtgctaaagatatacatacaaagtattttcaaaaactacatttcgaagatgtaaaatacgatttaaataaacttaaaaactctgggttcctaaacggcgtgtatgctagtaacactatttatcatgtaacaatttcagacaagactgttgtttactttgaaaatgagtttaaaaacaatttaaaaagtatcattgatagcatttctaaaattgcttcaataattcctggtctctagttgggtttataacttcccaatcatttgccatgaggtcatcggctgaaggttgccaatatctgataaggtttgtcccatcgctatttgaaatgatgcattgtaaaaaactatcatttgttggtaatatcttagttcgatgactttctttccaatctttccgtgtcatagagacaagattttttgtagctatcttagttgcttcttgaatgttcatttgttgttccacctttcgtgtataatgttgttatcaacctaaggaggtgataagtatgaaagcttgtttatatctttctaatgataaatttgttgaaatcgataatttagaaaaagtgataaagtcaggtcatcgcggaactgttgaaatatcaaaagaaaaaattaaaagttccttgttcactaatggctcatatacttttgttggagacaaaatagtagctatcgcttcagctaaaatcgaattcatagaatttatcgattaatctctttaagcaactctgcaactgctcgcaacagttcagggttgtttcttgtttctaaattactgtttgcatgttttagtaaattgagttttaatttacttttttctttagcgattctaaatttttgtaacatttgttgttcctccttttaagatgtttgtttaaatttcaaattggctaatatctacaccgtatttaatcgccatactcttaatcactgaaatgtatatctcaaccaatctaggttcatcagtaatcacatctaattttgacaacttgttaatctgggttttcgttgcaccattcgctagcattttgcctttgcggttctgcatacgaatttttaaattacagcgtcctttttcttctaaagctttatatgcttcagacttaactttctggtgcattgctccgccacctaaatgttgtgcaatcgcagataacattttgtttgtgtcgttacgccagtttttcgtttcaataccgacaatgtgacgaatgcctgtgatttcttgttgcatttgtttgttaaactgttcttggtctttttgtgctttgaacatcatctctaatgcttgcattggtgtttgtggtacattaagctgtgcttgttgtttaatgtattcatccattttatgaaatgcatcaacataagttgcagtaaacaaaatgcctttactacctgtcatcttgtttgctactatgtcgcaaccttttttggttagtaggtaacaaggttgtactttgttttgtgaattaacataggtgctttcttcaaagaaattatgactactcaattttgaggagtcctctaaaaccttgatataacctttaatgtctcttactaaattgtcgtgtcgctttcctatcatttccgcaacttctctactgtctacataatgtgtttcgttctgttctactatttgtaatgcttgcatttcagtttcctccttaagttaaaactttctttttgcgtaagtcttcgttaaaaaaaatatctcttccttcttgaggtgtcaattctaacgcaaaataaataccatttattaccgggtacgacggtttcgttctcccgtgaatcatattagataaagtatctctattaacaccaatttcttcagaaagggttttgatgttatgttctttcaaagccattttagatttcaaaagtttagcatctataggcatttcttttcaccacctttcgtattacgtaagtaatcttatcatgatgttacgaaagaggtcaagcactttacgaaagttttttagaaaaatattgcaaatgccgaaagttttccttataatagaactatcaagtaaaaggagctgtattacgatgtgcttttcaaaaagaatgaaacaatcaagagaaaaacaaggtatgactttggccgaactaggaagaaaaattggtaaaactgaagctactgtacagcgttatgaaagcggaaatatcaaaaatttaaaaaacgatactatagaaagtatagctactgcattaaatgttaatcctgcatatttaatggggtgggttgaagaaaacgatgatgaagtacaacatcgtgcagctcaccttgaaggagaattgacagatgatgaatggcaaagagttttagattatgcagattatataagaagcaaacgtaagtaaaggatgtatcagatgggattatatgaagaaactttaatacaacatgattatattgaaataagagaggctgatgtgcttccagataatttggatggggtatggttaggagatttaattttaataaagcgtggcttatcagatagagaaaaggcaggaattctctttgaagaattagcacataataaacttacatacggtgatatagccgattactcgaaattcaacaatcgcaagttcgaaaattacgcaaggcgacacggctttatctcagcagtcccgttacgcgaaattgtggaagcttacaattatggtgtacgtaacttgtatgagttgtctgagtatctgcaattgagtgaagaatacatattagaagcaatagaacaatataaaaagatatatggtattgggactcactacggcgaatactcaattacatttgagccattgagagtttttaaatataaagaaatataaacaaaggagaaattaaaatgaaaagattattaggtttaacattagcgagtgcgttagttttaggcgcttgtggtagccacgacggcgataagaaagaggaaagcaaaaaaactgaaacaaagaaagataacaaagataaaaagaaagaaactaaagaaaaagcagaagcgaaaaaagaaaatgctaatcaaaacgataacaataatcaagtaaacaacgagaacaacacaaacgttaacaacgatcaacaaaccaatagacctttaactaaagacgaaatatcacaaagagtaaaaaatggtcacaatgttaacggcatggtagatgcagatggtaatacttggtaccaagcacaaggcgcaggtgacgttataggttacacaaaacctgatggtacacaatgcacagttggtggttgtgtcacacctcagcaacaagaacaaataaacgaagctaattataaagagatggaaaaatatgggtattctcgtgaaaaatacgatgcaattcaaaaagaagcttctaaacttcaacaacaaaaagaaaatggagaaataacagcagaagaatttactaataggtatatagaattatacgactaagtatcttacaatcaattaattgtattgtgattaataacgtctatttagtgatttaatataaatataaacaaaggagaaattgacatgaaaaaagcaatcttaactttaagtcttatatttattacctactacctcacttttaaatatatgtggattaaagaattgaagtattaacagctttttatagccctttaatataaaaatcaaaaaacgcctactagtgtagacgttgaatggtggtgagaattttatggcggataaaaacaaaaaacaagaagctacccgtagtaacccaataaacaaaagttttgaaaagccgggtgccagcgaaaacttaaaaagtactttatcagaaaaagctaagaaaaaagattaatattcattcattaaatataaatccaatttaatttgttgtttaaggtctacaagtgtatgtttaatatacaattcatcgtttgacggtaaatcagatactttgaaatcttgtcgctcaacctctagtaaatcgaaatcgctaccagctgaattataggttttaagttcaccctcttcaatgattctgttttcaaagtctttaataactataaatactggtttaccgttgttattaaacaacttgtctcttttgtctaataagcttatacaatccaaattcataaactttcttgtttcattaattaaccagataatgaatttaacaattaaaggattaaatacaagcactgttaaaacaaaaataattagaaaccaaatatttgcttttagacctgtaagcaactgaagtaaactcaaattttttaaatcaacattattaaaaattataaaagtataaaaccatatcaaacatgtttcaatagaaaaaatcaataatacaggagtattgataatcttgtttttttcactaactaaacctatcattgttagatatttatatggtatgtaacctaaaactcctgtaagaagaagcgcccctagaaattgagtcatcttatcacctactttttattttattataacatatttagtacctagtactaaattttgggtagcccacctacccttattattttttacaaatttacagaacgtacgttcctacaggaggtataaacatgtggattgaaaaatttaaaaacaaaaataacgaaactaaatacagatattacgagaagtacaaagatccatacacagataaatggaagcgcgtaagtgttgtgttgaacaagaatacaaaacaatctcaaaaagaagcaatgtttcgtttagaagaaaaaataaaagaaaaactgaacaacaagtcgtcaagcgaattaaaaactttgacttttcacgcgctattagatgaatggcttgaatatcatataaaaacatcaggttcaaagttgactactcttaataatataaaaataagaattagaaacattaaacgatacagctctgagaacttgcttttaaacaaactagatacaaaatatatgcagatatttattaataaattatcagatatctattctcaaaatcaagtaacccgtcaactcggagatatgaaaggagctattaaatatgcagttaaattttacaattatccaaatgaatatttgttaactaatgtcaaaattcctaaaagaagaaaaacaatagaggatatcgaaaaagatgaatctaaaatgtacaactatttagaaatgaaccaagtcctacagatacgtgatcatatactaaatgataataagttacacaagcgaaatcgcattttaattgccagcatcttagaagtacaggctttaacaggtatgcgcataggagaactacaagcactgcaggaaaaagatatagatttattaaacaaaactattaatataacaggtacaattcaccgcattaaatacgaggatggattcggatacaaagacactacaaagactataagttcaaaaagaagtatcagcatcaattctagaaccgtagaaatttttaaaaagataatactggaaaacaaaatgttgaaaagatggaattcgagctatgttgacagagggttcatattcacaacaaaaaaagggaatcctttatgtaataatcaaatcgccggtgtgcttaagaaaactacaaaagctttaaatatgaataagaaagttaccacgcacacatttagacatacacacataactttattagtagaaatgaatgtttctttaaaagcaattatgaaaagggtaggacatgtagatgaaaaaacaaccattcgcatatatactcatgtaactgaaaaaatggatagagaactaactcaaaaactcgaaaacattccaagttagcttaaatctgccctttttttgcccttatattttttacaagctttataaaacgcttgagaacactggcgttaaagcttttcttgaaataaacatatcatcataatgtgatggttcaaatatcatttgtacaatcaaaggcttcatgttcttaacaatatcatctaaatggttatctaaaattggtgacactgcttttaaatcattaagaaaaggctcccatttgcctaaagtattatctaattcttctaatttagttttaatataattacaagttacattaggaatcagggacaaaaattctttcttttttacatttaacatttcaattgcatgtcttaaattcttacgtattttgggaattgtattaatcaaatattttattacatcgacaattttcgatgcatattcatcatatataccttgaacatagtctgctatttttttaataccatcatcgatatggtcttttaatattttcatttttcttcctaaataattagaaggtataactagaccctgtaccatattttcgccgctacaattaatttgaaaatttccatctaaaattgttgcatcttgttgtttcataatacttctaatatctgcaatttgcctaccataaatatcattttgattttttatttggtctatattctgtttcactactttcaaatgtttcatcatttcttcagatactccatctctgaagtcgtgatctatatttttgaaaatttctaaaatttcattatctatactatcatacactttttctataaaagattttatacctttaaacaactcattaattctttcttttaatgcatccaatgcaaaatcaggtaataagtgtttaacagcactaatactttctattgtttcatctgcaacttcttcaagtgagtttattttactaattaaagttctttccatttcttctaactgaaataagttaatcttatccttaaatccttctgataattgtttctttctatctgcaaaatttttattttcattttctgagatgttaaaactttcatttaaaaagattacgcattctgctaacataccacttgtttcaccagtaatcagtttactcaacgcatcaagattttctaaattaagtttaattaaagttcctcttccagaacgtgcaatcgaatctcctgtccaaacatttattggaattcgcccatccatatctaatgttatgttaatagtcttttttactttttttccatttttaatttctgtatcttttaccgactttattttgattagtggtacagtatcgtatgtgttatcttttctatttaacttccttttataacctacatggctgtctattaaagtatctaacctgggcacaccatcattaatgttaacgcgttttcctggcatatctttgatgaatggatcttgtaaccatgttaataaatcgttggtactattaaaactaatcatattatcaaagcgtggtctagcaaatttctgccaagcagcataaggaatcattgctgagtcagtagcaacaactttttcattcggatgtttcgctccttgatattttgctcctgcaccgccttccgaattaccgccatccgccacaatggttttgtttttgaagttacttgattccattctatatttttttaaaaaatcactatttgataatctatctgcatcttctaactttattttatattgatttgataattgatctgtttgctttaaataatctgtgctttcattatcattattcattaatttagcattttggagccaatcatctccaaaccccgatgattttaatggattatttggattaattgcctcattagatgttccttgataaattattgtctgttgaccagttggtttacttttatcatctaataactcatatattttaatatcagcagcaccattcaaattactattcttatcatcattataactgtctacttgtttaaacctttttccattaactttaaattctttttttatatcaatattttgataaacccagtaactacttaattctgttaaatccctatcattaattttattcatctttactgtgcaccccatattctattggacgattatcatcataaaaggctttcttagtattaatagtgggtttccctatttgtattgtgattgtagatttatctggtttattttttaaattatataatttatcacttagttcgattacatcatctactgtattgtctttagtaaagtttttcttagtagaaaaaagtgtagcaacagcatctgtatttgcagcgtaattcacttcttttcttgctcgttccattccttctttaaattctttatcattttttcgaatcagtggttcataatactttcgatattcttttaaacttctagaagagtatgtaatataaaaatattcatttttatatccgacattttgtgtcttgttaattgcctcttttgtaaagcctgtatattgatatttcttttcattttctttgaagaatttatataagttatcatacttttctttttgcgctcgatattcaaagccactcagcactgtacccaccatcatactcatatcatcaccattgtcattactgcgcattgatcctttttgatggatggcatctttgtacaaaggtagacttgcattaaatacaatgccatgatcttcacaatgcacataaacttctacaccatcatctttacctacaacatttgtagctttaacttttagtccaaagttatctttaaagaattgttcacctactttttcaaattctttacgatgcttcttcgcaaattcaatcgcatttttttctgcaggcggttgaaagccttggcctacatattttgaagcttccatttcttctggtacagattttgtttctgtttttgtgtctttttttgattcattttccatcgtggaacatccccctaaaattaatgtcgtagctaaaactgatccaatgaattttttcatatgacacctcgaataatttaattaatacaatatatctatattttaccctatttttataatcaaataaataactttatcaaactttatatttttgtataaattagtaatatatttaatagttgatattcgcaaaaaccctaagttctaatccacatacaaaattccccacatcaatcaaaaaacgcatgctataaattagagtctctaatcaataacatgcgttctgaaataactatattcaattttattctggttttggtagtttaataataaatgttgtgcctttccctaattcgcttttaacatctatggaaccaccatgctcttcgataatcattttacaaatgaacaaacctaaaccggtaccttgtttacctcgcgttctcgctgcatcaactttataaaaacgatcaaatacttgttgtaaatgttctggtgcaatgcctgtacctgtatctttaatgtataaaatatcttcgctttcattttcatcacaagtaattgcaatttcatctccaggtttcgtataacgtgatgcattatcaattaagttcgttagtacttggtccatgcgatccatatcataactccaaacacgcttcttacaataattaaaagtcatatttagacctaaatcatcagcttgttggcgatacttaattttcatcttatctagtaacgctgcaataggctgaacttctttatttacggataacccttcagcatccatgcgtgcgacatttaacaattcattaactaaacgatttaaacgtttcgattcatcaaggacaatggcaagcgattcttttatttcatccggttctgtaacaataccatctacaattgattcagtataaccttgaagtaatgatatcggtgtacgtaattcatgtgatacattagcaatgaaatctttcttcatttgatctagattgtgctcattagtcatatcacgaactgtcacaacaacaccacttttacctccctgttcaatcttgtcgatatagcttgtggtcacaacaaagaatcgtgcattcatttctaaatcgcgcatttcagtttgttttgatttaaaagtatcttctatttgtcttaataagaaagctttagcatcttcatcaatattgtccataatatcattcgccatcttattagataagataatttgtcgactctcattaatacctaggacaccttctaccatagagttaattaagctgtctctaatatttttagatgtggataatgcgtcgacatgctcttcgatttctgtactcatctgattaaatgcctgcgataattgaccaatttcatctttcgttgtgacagaaggtttataagagtaatccccttcagatacacgtgtagcttggtctcttaaacgtcttaaaggttttgtaattcttgacgataagaaaaacgcaaagactgttgtaattgttaagaaaataacagccgtaattatggtgataatcgtaatagcattatttgtatcttcgattgatttcaagtctttatatataaagactccactatatttgctatgactattcttctgtgcttttgttggatagcctaacaaaatatatgtttgagatgagcccttttctttaatcgttacatttcgagtaacagatttacctttatcaaacacatcgtcaaaatggtcgttgttgactacttcattcaacatttgctttttaatattagaaagtgaagccgttgattgacgatgtttattatttataatcatcaacccaccaggattttcaattaatgtttgactatattttattgcttcttctttattatgtgattgttcgaccagtgaacttatacgtctagcatcttctcttatggcattttcggtttcttgtgtgaaatagtattgcataaaggtaattaaagcaatacttaataaaattaaaactgtcgtcactattaaaataatagttaaccacagtttaattacgacactatttagccggctcatcattagatttaacctcaaatttatacccaacgccccagactgtttgaatcatatgcgcagcttcactagacacacgatttaacttttctctaagtcgtttaacatgagtatcaactgttcttaaatcaccatagaattcataatgccaaacttcttttaataattgttcacggtcaaatactttatttggtgttttagctaaatatattaataattcgtactctttaggagtcaaattaacttcttgattatcagcaagtacgcgatgtgcatcattatctatttctaaatgtttaaattcaatcacatcacgtgcgtgaggttcgctttgttctacagttgtagattgcgttcttcttagaagtgctttaactcttaagactacttctcttggtgaaaatggtttgacgatataatcatctgcaccagattcaaaaccttcaacacggtttgtttcttcacctttagcagtcaacataataatcggtgtttgtttatgttcacgcaatttagttgccacctggataccatccatttcaggcaacattaaatctagtagtatgcaagcataattattctccattgcaagttcataagcctcttggccattacttgcttcatggatttcaaaagattctctttctaaatacattttaagtaatcttctgattctatcctcatcatctacgataagtatttcgttcgacatacaggtcatacctcccacacatgcttttctttacaaaagtattatatcacaggaaagcgcatacagttattaaaaacctaaaattttgtgaaaaaattctcaaactttgtgataaatacatattttatttaattatttcccatgttctgctaaatgacgcatcacttttacttcatgaggcgtcaatacacgtccttcaccagcattcaaaccgacaacatttaaaggcccatattcaatacgagacagtttcgtcacttgatgaccaaaatgttcgaacattcttctgacttggcgattacgaccttctgtaattgtaatttcaaccaatgttgtgtttttatctttatcttgtttcttaactttcacttcagccggttgcgtcataccatcttctaattcaatacctttttctagcgctttcacttcttctctcattaaataaccttttaatttcgcaacatattttttcttaatttgatatcttggatgtgtcattaaattagtaaattcaccatcatttgtgagtaataacaatccagaagtatcatagtctaaacgaccaacaggataaatacgtgcttctatatctttaaagtaatctgtaaccactgtacgtcctctatcatcagatacacttgttatcacttgagttggtttatggaataaaatgtaaattttgtcttctagttctattttaataccttcaacttcaatcgtatctgatggcttcacttttgttcctaattcagtgacagtcgtaccattcactttcacttttccttcagaaattaaagtttctgccttacgtcttgaagtataaccgctattagctatacgtttttgtaatcgttctaattctttagtcattattttctcctttttgattgactagattactgaaaaaagcatccatttcttcatcgtcttcttcagttgtcggcaaatcttctatattggaaataccaaatacatttaaaaataaatcagtagtaattaactgttggctacgctgttcattaaccactttagcctcaactagtcctttggcaatcaatgtcttaactgcaccatctgaattgatactacgaattaattcaatatcacttcttgataatggctggttataagcaataattgatagtacttccattgctgcttgtgataatttcatttgtgacttttgttcaattaattgttcaatatacgttgccgcttcttttttagtcgttaaaacatacgtcattccaaatcgttgtatcattaatccatgtgatgaataattttcaattaattcaacgagttggtctttcgacatatctaatatttctaatagttgtttttcatctaaaccttcatcgccagctgtaaataaaagcgactctaatataccatgattatccaaaatggtagttcactcctctaataatgttaatatcttcaaaattacgttgctgctcaatattaattattcctgcttttgacatctctaaaatagctaaaaagtgagtgactacttgttcaattggctcagaaaacgtaaacagactaaagaagttaaaatgatctttatctttcaatctcgatgtcacttgttctgtagcttgttgaatggtaaatgtctcttttcggatttcaacagatttaggtgtatttaactcaactctatttttaactctttgataagctacaattaattcagttaaatcaatcgtatgatttggatcccaagattcatctgtttccaaatgagataaatctgtcggtctttttgtaaaataaaaatctctttcttctttcatgtcatttaaaatagcagtatattctttataattttgatattctattaaacgcccaactaaatcttcccgtgggtcatcatcaacatccatatctgatgttgattgtggtaatagcatcttacttttaatcattaagagttctgacgctaatactaggtattcacttgcaatattaatttcaagctgtttcattgcatgaacgtactgcatatactgctctgttaatgcttgcataggaatatcataaatatctatttcaaatttttggataagatgcagcaataaatctaatggtccattgaaagcatctaatttaacttcatacataatatctacctcgtattgcgtcatatgtgcataattctctaaaatattatagcatgaaaataacttacttttaaattggggtgataacaaaatgcaacaggcactgataaatttctattatcaatttcatactaagcaacattatttcctatgtcatgacattttagaagatgcatggaaagctgaaaataactacagtaagcaagatgcagttgttagtttaatcttgtttgcaactgcttgttaccattatcgccgcaataatttaaaaggcgcctataagtcttttaataaatctaaagaaataatacaaaatgctaaagatagagatgcgttataccttaatttaaatgattatcagttgttaattgagcaacagattgcaaaattgaatgcagcaaagcctttttcatctgttatattaccaataactccagtctttgaacgcatcatcaaggccaactatccagactatgattataatcaggaaacagcaacagatccttttattgtagaccatcacatgcgccgtgatcgttcagaagtgattgcagcaaaagaagaagcgattcaattaagaaaacatagacgtaattaatcaaccaatttaaaaaagccacaatagcacagacatttttagtcatgtgtattgtgacttttgagttattgttcactttatgctctaggatgaaattggttatacatttttctaatttgagatttcgaaacatgtgtatagagttgggtagtagatatgtcagagtgacctaacatctcttgcactgctcttaaatctgcgccattttccaataaatgtgtcgcaaaagagtggcgtaacgtatgtggcgttaacgtctttttaatgtttgcctttacaccattttgtttaatcattttccatattgcttgtcgtgataaaggtttaccatgcatatttaaaaataagacttcagtaacagtcttttttaaaagttgcggtctaatcgtttcaatataagtagttaagtactcaatgactgcgtcgcctaatggtacaattctttctttatcgcctttaccaaatacgcgtacaaatcccattattaagttcacgttttctaactctaaatgtatcaattcagatacacgcattcccgttgcgtacagaagttctaacatcgtacgatcacgatatccattaattttatttaaatctggcgtttctaataaagccaacacttcgtcaacatttaaaacgtcaggcaattttttgtcatattttggtgaatctaataataccgttggatctttcgccgcatatttttctcttatagcaaattgatgaaaactacggattgttgaaataaatcgcgcaatagatttagcagattgcccttggtctattaaatgccccaaacactcttgaattaattgtcgatctataaaatcaatatgcgagatatgatgttcagtcatataatcttgatactttttcaaatcacgtctataagcaccaattgtgttagaacttagtcctttttcaatttgtataaaacgcaaatattcttcaataattgtttccataaccacacctctaaaaaaagcgaaggttaatttaacctacgcaatttactatcctttacctttagcttggcacgtttcacacacaccatggaaagttaaacgatgatctaaaattttaaaattgaactcattttcaactcgattttcaacttctggtaacaaatcttcatcgatttcatctacacgaccacattccatacatactaaatgatggtggaaatgttttgcgccttcttttcttaaatcaaaacgagcgacgccatcaccaaagttaattttgtcgacaacttttagttcagctaacaactctaacgttctgtatactgtcgccaagccaatttcaggcgctttatcttttactttcagatatacgtcttcagcacttagatgatctttttcattttcaattagaactctaacagtagcttcgcgttgtggcgttagcttatatgatgattgttgtaattgttgcttaacgcgatttaatcgttcttccaacgatgtccactcccctactaataattaaaatcattacaaattatttcaaacttcacaattaaaactaacagttttctcaataaaatgcaagcttttctcatttgttatttagaatgattataatttaataataggtgttgcaatgcaatgatagtcttcgcatcttctatttctttattcattagcatcgatttaacattctcaatcggaactttaatgacttcgacaaattcatcttcatctaagtgaactgtaccttcttctaaattatccgtaaaatatattgataattgttcatcgcaaaaacctggtgaaccatacatatctacaacatgtgttaactctttggcaatatatcctgtttcttcttctaattcacgttttgccgcttcgactctatcttcatcatcttctaatttaccagctggaatttctagcaatggtttttctactggtttacgatactgtttcactaatacgacttcttttttaggtgtcactgcacaaacagcaactgcaccattatgataaactaattctcttgttgacgtttcaccgtttggtaatgtcactgtatgaatttctacatctacaattttgccattataaataactgttcgatcaattgttttttcatttaaatccattataatcacgttcctttaaattcatattatatattgatacactatgcttgttagctaaagtgtatcgaaaggagaacagacatgcaaaaaaatatattaaaaagtggtatttcattatctgaattaggtctaggttgcatgagtttaggtacagatttaaaaaaagccgaacaaattatagattgtgctgttgaaaatggtatcacttattttgatacagcagatatgtacgataaaggtataaatgaatcagttgttggtaaggcacttcttaaatatcaacaacgcgatgatatttttattggtacaaaagtaggcaatcgtttaacaaaagatggcagtacaacatgggatccgagtaaatcctatattaaagaggcagttaaaggttcactaaagcgtttaggtatcgatcatatcgatttatatcaacttcatggcggaaccattgatgacccattagacgaaacaataagcgcatttgatgaattgaaacaagaaggaattatacgtgcttacggtatttcttctattcgcccaaatgtaattgattattatttaaaacatagtcaaatcgaaacgataatgtctcaattcaatttgattgataatcgtccagaatcattattagatgcaattcacaacaatgatgttaaagtattggcaagaggacctgtgtctaaaggattattaacttcaaacagtgttaatgtgctcgacaataaatttaaagatggtatttttgattattctcatgatgaattgggtgaaacaatagcctctattaaagaaattgaaagtaatttatctgcattgacatttagttatttaacatcacatgacgtgcttggttccatcattgtaggtgcaagtagcgtcgaccaattaaaagaaaatattgaaaactatcatactaaagttagtttagatcagattaaaacagcaagagctcgtgtaaaggatttggaatataccaatcatttagtgtagaagtcattttcagtaataaaaacagcagcatgaggcgtttcattataaaaatgccttactgctgttgtttatgtacaattcgctataatttatgattatgattactcacttatgatagaaattaaagcgttgtcctcacgcatcagtatttagtaatttcgccttgcggcattgccttaagcaaacttctgccacttcatctcttaataattttattaaaacatctttctatatttcacttcgcatgttgattcatcattattagttattatttgtacacccagcacatttccttgcaacacaagtagtttgaatttttcacaagtataatataatgtaccgtctgaaatttggtctacagaaatatcgcctaaaatatccagcactgtaaattcttcaaatactgatagttgttccgcatatcgtacacaaagtcttaccacactctccgattgacagttcattgccatcccacctatttatgctttatttttaaataatttagggaaacatcgttcaaaaaatctaggcgcaatttgatacattttcaacgcatgatgcatccatttaggccgattaatttccaattgttttgttttaatgccataaatgatatcttctgcaagctgattagcatcaagcataatttcccccatctttttagcatacttcattgatgggtcggctttttgatgaaaaggtgtatcaatcgggccaacattaactgtcatgatatgtaagtttggtgactctagtcttaaagcattcattaatgcataaaaccctgctttcgatgccccataatgtgcagcatttgcttgtgtggaaaatgcagcttgacttgaaatacctacaatatgtgcgttagatgttaaatatggtctcaacacagtatataaaacattaaaactaattaaattaagctgatacgtttcaatcatttctgaaaaactatggtctgaaatagatttgaaataacctaaacctgcactataaatgaatccatcgaatgatgtattgtcttcaaattgcagtgcctgtatcgacttcaaatcatttaagtcacaaggaataacatttatagttttccccaattcctgttcaaagattctagttgctttatcaacatcacgcaccaacaacgttacatgcactttattttctagtaactttcggacaatcgataaacctaaaccactcgtaccaccagtcactataaaatgttgtcctttcatcaattaaccttccttttcaattatatagaatgcaatttatcaactttacataattgagacaagttgattatctttcctaatatatatacaataataagaaaatataacatacaaatcaaaaactaaagggatgtgacgttaatgaaactcgtattttatggagctggtaatatggcacaagctatatttacaggaattattaactcaagcaacttagatgccaatgatatatatttaacaaataaatctaatgaacaagctttaaaagcattcgctgaaaaactaggtgttaactatagttatgatgatgcgacattattaaaagatgcagattatgtatttttaggtaccaaaccacatgattttgatgctctagcaacacgcatcaaaccacatattacaaaagacaattgcttcatttcaattatggcaggtattccgattgattatattaaacaacaattagaatgccaaaatccagttgctagaattatgccaaacacaaatgcgcaagttggacactctgttactggcattagtttttcaaacaactttgaccctaaatctaaagatgaaattaacgatttagttaaagcatttggttctgtaattgaagtatcagaagatcatttacatcaagtaacagctatcaccggaagcggcccagcatttttatatcatgtattcgagcaatatgttaaagctggtacgaaacttggtctagaaaaagaacaagttgaagaatctatacgcaaccttattataggtacaagtaagatgattgaacgttcagatttgagcatggctcaattaagaaaaaatattacctctaaaggtggtacgacacaagctggccttgatacattgtcacaatatgatttagtatctattttcgaagattgtctaaacgctgccgtcgaccatagtattgaactttctaatatagaagaccaataaaaacaaacccgccaacacatgtatgcatcatcgcaagcactgtgtttgacgggttatttttataatttattgttatttggcaagcattgtttattactttgtcattagattttaaaactatcaaaatcttttacaaaattaaaattaggtgtatcttcattttgtatcaatgtttgataaatttcatttatatcttctgtattatagcgattgctcaaatgtgtaatcaacgtacgtttaacattggcttcttttatcaatgcaaatacgtcttcaatatggctatgatgataattgttggctaaatgcttttcaccatctatataggtcgcttcatgtaccatcacatcagcatctctagaaatcacacgttcattagaacatggttttgtatcaccaaaaattgctacaactggaccctgtttggactcacctctaaaatcttttgattgataaacttgaccattatgttcaaatgtatcatgagattttacttcttgatatttaggacctggttcaagaccaatgttttttaacgcttcaacattgattgtacctgtagtttcaggtgccattactctatatccatatgatggaataccatgattaagtaaatgcgcctctacagtaaaaccatcatgatgatatgtcagatgatcatcgatttcaatatatgtaattggatagtttaaatgtgactctgataaattcatagacatttccacatatgctttaattccttttggtccaaccaatgtaagcggcttctgttcaccgccctgaaaagaacgactagaaagtaatcctggcaaaccaaaaatatgatcgccatgcatatgagtaataaatatatgtgtcacttttcctaatttaattgcatgatgtaaaatttggtgctgtgtaccttcaccaacgtcgaaaagccatatggaattggaatatggttctaaatttaaggcgattgcttgtgtatttctctcttttgtaggcaaacctgcactcgttccaaaaaatgtaacttccatatatgcccctccttttcttcaattcattttatcataaaatttgtatcaatttagttttaatttatacttgaatcaaaatctgttaaaaattcgtctttgctagttaatttttctaactttaacgtagacataactatataaattttgataattacgttatacttatcattaataagtatcacattaaacatgatacatgaatcgatatttcatttaagacactgcatacagtcgagcatattgtatgacctactgaatggattatcttataataataaatcatatatctaattaagaattgaggttttaatcttgagtactaaaaacaaacacatcccatgtttaatcacaatctttggtgcaactggtgacttaagccatcgtaagttgtttccatcaatattccatctctaccaacaagacaatttagatgaacatattgccatcatcggtattggacgtcgtgacattactaatgatgatttccgtaatcaagtaaaatcatcaattcaaaagcacgtaaaagatacaaacaaaattgacgcgtttatggaacatgtcttctatcatagacatgatgttagtaatgaagaaagctatcaagaattactagattttagtaatgaattagatagccaatttgaattaaaaggtaatcgactattctatttagcaatggcaccacaattctttggcgttatttctgattatctaaaatcttctggtcttactgatacaaaaggatttaaacgccttgttatcgaaaaaccattcggtagtgatttaaaatcagccgaagcattaaacaatcaaattcgtaaatcatttaaagaagaagaaatttatcgtattgaccactatttaggaaaagacatggttcaaaatatcgaggtattacgttttgcgaatgcgatgtttgaaccattatggaataacaaatatatttcaaacatccaagttacatcttctgaaatactaggtgttgaagatcgtggtggttattatgaatcaagtggcgcgctaaaagatatggtgcaaaaccacatgttacaaatggttgcattattagctatggaagcacctattagtttaaatagtgaagatatccgtgctgagaaagtaaaagtacttaaatcactgcgtcatttccaatctgaagatgttaaaaagaactttgttcgtggtcaatatggcgaaggctatatcgatggtaaacaagttaaagcataccgtgatgaagatcgcgttgcagatgactctaacacacctacctttgtttcaggtaaattaacaattgataactttagatgggctggtgtaccattctatattcgtactggtaaacgtatgaaatctaaaacaattcaagttgtcgttgaatttaaagaagtaccaatgaacttatactatgaaactgataaactgttagattcaaacctattagtaatcaatatccaacctaatgaaggtgtatctttacatctaaatgctaagaaaaatacacaaggtatcgaaacagaacctgtccaattgtcttactcaatgagcgctcaagataaaatgaatactgtagatgcatatgaaaatctattatttgattgtcttaaaggtgatgccactaacttcacgcactgggaagaattaaaatcaacatggaaatttgttgatgcaattcaagatgaatggaatatggttgatccagaattccctaactatgaatcaggtactaatggtccattagaaagtgatttactacttgctcgtgatggtaaccattggtgggacgatattcaataattgaattaaaacgcacatgttaaacaaaaataaatgagcgaatgacaaggattgattacgaatcaagtaaatcaattgttctatcattcgctttttttctagactatattatgaaattatattttacaatgcccaaaactattttaataatcattgaacaaatgggtgtataatttatagaaataatgtagaataaaaataaatgattgaattaattggagtgaaagttttggacgttatcaagcaaatacaacaggcaattgtttatattgaagatcgtttattagagcctttcaatttgcaagaattaagtgattacgttggtctttcgccataccatcttgatcaatcatttaaaatgattgtcggcttatctccagaagcttatgcacgcgcgcgtaaaatgacactcgctgcaaatgatgtgattaatggtgctacacgacttgtagatatcgctaaaaaatatcactatgcaaattcaaatgattttgcaaatgattttagtgattttcacggcgtatcacctattcaagcctctactaaaaaagatgaattacaaattcaagagcgattatatatcaaattatcaactactgagagagcaccttatccatacagattagaagagacagatgatatttcattggttggatatgcacgatttatagacactaagtatttgtcacatccttttaatgttccggattttttagaagacttgctcattgatggtaaaattaaagagttacgacgatataatgacgttagtccatttgaactatttgttattagttgtcctcttgaaaatggtttagaaatatttgtaggtgtaccaagtgaacgttatcctgcacacttagaaagtcgatttttacctggcaaacattgtgcgaaattcaatttacaaggtgaaattgattatgcaactaatgaagcttggtactatattgaatcaagtttgcagttaacattgccatatgaacgaaatgatttatatgttgaagtgtaccctctcgatatttcatttaatgacccattcactaaaattcagctttggattcctgttaaacagagtccttatgacgaagattaaataataaaaaacaaagaagccccctaatatatctataggtctacaaatggccttagattctattagggggcatattaatatgttaatttagttcgataacacatgcttcatatggacgtaactgttttaaattaactttggcatcataattaaatagctttacttctccatggcttaaatcaaatggtacagttaattctgcttcgtggttagtaagattacctacaataagaacttgcttttcatttaatgttctcgtgtacgcaaaaacttgtgaattttcagcatctactaaatcaaattgaccatatacgtatacatcattagactttcttaattgaattaaatctttataaaattgtaatactgaatgctcatcttctaattgttgtgcaacattgatagttttataattcggattcactgggaaccacggttcaccatttgtaaatcctccatttaacgtatcatcccattgcattggtgtgcgagaattatctcggttctcatctttatatttcgcaagtaaagcgtctacatctccaccttgagctttcactatttgatagtcatttttaacagcaacatcgttaaacgtttcaatactttcaaatggataattcgtcataccaatttcttgaccttgataaatgaatggcgtaccttgttgcaagaaataaacagctgcatgacttgttgctgattcataccaatacttgtcatcgtcaccccacgtcgatacacgtcgtggttggtcgtgattttcaataaacaacgcattccaacctttattttcaagttgtttttgccatctatttaatacagatttatacgaatttacatcaaagtgagaatcaccactattccacagtcccaaatgttcaaattggaatatcatattaaatttaccattttcttccccgacccagtcatcagcatcatcagggcttacaccattcgcttcaccaacagtcataatgtcatacttacttaatgagcgatctttcatctcttgtaaccaagtttgtatacctggctgattcatatctacatcaaatgctggggcatatgttttaccctcaggtacaggtaagtcacccgcttcaaacgtcttcttaatatgcgtaattgcatctactctaaatccatcaatgcctttatcaaaccaccagttcatcatttcaaatacggcatctctaacttccggattaccccaattcaaatcaggttgttttttactgaataaatggaaataatattgctcagtattagcatcatattcccatgtagatccattaaatatactttcccagttgttaggttcagagccatctggctttggatcttgccaaatgtaccaatcacgtttgggattgtctttactagatttggattctataaaccaaggatgttcatcagatgtatgatttacaactaaatctaaaataagcttcatgcctctatcatgaacaccttttaataaacgatcaaagtcttccatcgttccaaattcatccataatctcttggtagtcactaatatcataaccattgtcatcattaggtgatttaaacattggactgagccaaatgacatcgataccgaaatcttttaagtagtccaatttatcaatcattccaggtaaatccccaataccatcgtgattactatcattaaaacttcttggatatacttgatatgctactgcttctttccaccattgcttattcattttaaaactcctttgctatcgctgtgttgattttcttatttttaattctgtatctataatgacgagttcaataacatcctgtgctttgtttttcaatatatttaaaattgctgcaccagcctgttgacctaacattcgaggcttgatgtcaatacaggtttgtggtggtgacgcaatttcggttaaataagaatcattgaacgttgctgtcattacatctttcggaatttcaatattaagttcatataggacacttaaaatcgctaaatgtaacatagcatctaacgaaatgattgcctgtttaatatttgggtccttcaaacgcgtatgtagattttgcatgtaattaaaaataacttctctttcattactagtctcaataatttgataattaattttattttgagaagctatcgtttcaaatccttgaattctatcttttgaaacttcaaaatttcctttttctgtaataaatattaattcatctacaccttgttcaataacatgtcgtgtcaaattttcagaagctaatatattatcattatctatatgtgtaaattgatgatctatatccgatgtaggcttaccaatcacaataaatggcatgctttcatcaattaacatttgtttaatcggatcattttcttttgaatagagcagtataaacgcatcaaccattcgttgtttaatcattttataaacttcatccattaaatcattcatattatttgagactgtcgtttgtgtaccatagccatgctggttacacgtttcagaaattcctagcaatacattgatgtagaatggattcagtcgaataggctcctcagacccttttaacactaaaccaattttatatgtttggtttgtaattaaagttctagcagcggtattaggaaaataattcaattcttccataactttcttcacttttgaaattgtcgcttcgctaatacgttgatttccttttataactcttgaaactgtcgaaggagaaacaccggcttttagtgcaacatctttaatcgtaaccatttaatcacctcctgttaatttctgcattggaaaacgcttccaaccactgtataataccagtttagtcacactttctaaaaaagtcaaaagatttgtgcaaacgattgcataaaacgataaaaataaaaccttcatactgaaattcaatccgaaaatcaatataaaggtttgtataaatattaaaatcgattgtttagtcactaactgcaaaatagttaccttggccatcttgaaaattaaatacacgttgaccattcatttctactatatcatgcccagttaaacctaaatcatttaattttgagtataatgcatcaaagtttttctctttaaacattaaagatggtgttcctaggttcacttccgggctatgcttttcaataaattcttttgccataatcgtcaatgacgtttcagcatctttggtaggtgatacttcaactgcaacatagtcctcagctaacggtgtttcacttacaacaacaaattctaaagtttctgtccaaaatgctttcgctttttcgacatcatcaacatataacataacttgatttaacttttccataaaatagtacctctatttctctatagtacatgctatcataacacagtaaatattttattacttcacaaaatgcttaaaaatatggcgggatgcttttaaggtcaaggataatacttgtgtaattttttataggttgtagctactctatcacactctcttttatatttatcaaaagatataaaaaaggatagtatctttcaactatcctttaatcaatattattcttcaatccattgtgtatggaatacgccttctttatcttttctttcgtacgtatgagcaccgaagtagtcacgttgtgcttgaattaagtttgcaggtaaatcagcagcacggtaactatcatagtaattaatacttgatgagaaaccaggtgttggtacaccattttgaacaccagttgcgacaacatcacgtaacgcatcttgatattcagtaacgatgtttttaaagtaaggatctagcaataagttttgtaatcctggattattatcgtaagcatctttgatcttttgtaagaattgtgcacggataatgcaaccttctctccaaatcatagctaaatcaccaagttttaaattccattcattatcttcacttgctttacgcatttgcgcgaaaccttgtgcataagaacaaattttactcatatataatgctttacgaattttttctaaaaagtctttcttgtcaccatcaaatgatgcttttggaccatttaattctttagaagcatttacgcgctcttctttgattgaagagataaaacgtgcaaatacagattcagtaatgattgttaatggaatacctaattctaatgcgttaattgaagtccattttcctgtacctttttgacctgcagtatcaagaattttttcaactaatgcttctttattttcatctaatttcatgaaaatatcaccagtgatttcaattaaataactttctaattcaccagcattccagtctttgaacgtttgagcaatgtcttcatgagacatgcctaataattctttcatcatagcataactttctgcaattaattgcatgtcagcatattcgataccattgtgtaccattttcacatagtgtccagcaccattaggtccaatataagtaacacatgaagcaccgtcttttgcctttgcagcaattgcatcaagaatatctgcaactttgttataagcttcttcttgtccacccggcattaatgacggaccagttaacgctccaatttcaccaccagaaacgcccataccaataaagttgattgcactttgtgctaatgctttattacgtctgatagtatcttgatagtttgtattaccaccatcaattaaaatatctccatcatctaataaaggtaacaaactatcaatcgttgcgtccgtagctttacctgcttgaaccattaataaaattttacgtggtttttctaaagaattaacaaattcttccaatgaatacgttggatgaatatttttcccttttgattcttcaaccattaaatcagttttttcacttgagcggttaaatacagatacactatatccgcgtgattcaatattccaagctaggtttttacccataacggctaaaccaataactccaatttgttgtgtcatattacttacctcacttgttgatttttcattagtattgtatcacaaaatagacatacactacactaaatcatttcgaatgtcgcgcaactattttgattatttctaacacttgacttgcaagcaagttcaatgatttaatcggcattctctcatttgttgtatggattttttcataacccactcctaaaatgactgaaggaataccaaatgtattaataatactgccgtctgaaccgccaccagaaataattgtatttgcagataatcctaaattacgagcactttcttgtgcaattttaacaaccgcttcattatcattaattttaaatcctggataactttgctccactgtaactactgctttcccacctaattctgatgcagtagtttcaaacacatcagtcatatgtttgacttgtgtttttattctttctggatcgtgagaacgtgcctctgcttctaaaatgacttcatctgcaacaatattcgtagctgaaccgccatgaaacttaccaatattggcagtagttatttcatcaacttgtcctaatttcattcgactaattgctttcgccgcaatattaatagcactaacaccctcttttggcgtacttgcatgagccgttttgccaaaaattttagctgaaattaacatttgcgtcggtgcacctacaaccgtagtaccgacatcagcacttgcatcaatagcataaccaaagtccgcgtccaacaactctgaatttaattctttagcaccaattaaacctgattcttctccaacagtaatcacaaattgaatttgtccatgtgggatttgttgttcctttatcacttgcaaaacttcaagcatcgctgctaatcctgctttatcatctgcacctagaatagtcgtaccatcagagtatatgtagccgtcatcttttacaattggctttacattaattgcgggtacaacagtatccatatggctcgtcaaatataatttaggtacttcgccttcttcgatagtactattcattgtacacactagattattggcacctaatttaggatgtttagccgcttcatcttctttaacatctaaccctaatgctatgaatttttcttttaaaataggttggattgttgattcattccctgtctcagaatcgatttgtacaagttcaaaaaacgtattaagtaatctttgctcattaatcataatggaaccccttttatcaaaattttcatgtacgccaaacggtaaaaattgatgaaataaaatgttacagtaattgacgttacacagatttatcaggtttgtaaattgtgtcatattattttcaatttattatatataattattgtaactcaaactaagctttgtcaaaaatatattgattgatttttcaaagatatcgtataatgaggaaaatgacataagcaaacttactcatgttttttattatattcctttatgatgattgctagttatatcgtctcaagttaaaagttttatatcttatgtcgtaattattaatacaaaggttattcatttggaggcacacaaaatgcaaaataaagttttaagaattatcattatcgttatgcttgtatcagttgtattagcattgttattaacgagtatcattccaattttataaactatatctcaactacctatacaaaatcatacaattaaaaatccatccattataaacgcatgtattaataagttatcgtattgcaacgattactttcaaacatgggtcatacggatggattattttttaagctacttcactatgcattttcaatgaaccaaattgcgatttgatttgtaaatattcttctaattcatttaatatttgaataatacttgctctcgagttaagcgctttgtgtgttgttggcaatggcagttcatccaatttcaaacgcgtctcatacaaattgtgtaaacgcattgctgtatagtcattactattcacatttagaccaatttctttcagcagtgacgcaacatcatttaaaagcggatctttatgacagatactttcgatgagcggtttcattctcattaacaattccacttgctcttctcgcatatcaaaataatgatagtatgaattttcgtttctaacaaaatgatttttaacatctcggaacgcgatagacttcgcctttttaatatttaaaagtaacacttcaaattcaatcgcaatggtatcttcatatttttcacaaatataactatatttactaaaaatatcagcaatttgttgctcaattttacatttgtattcgtctagttgtttgtctaaacttggcatcattaaattcattgtaaatgcaatgcttagtccaattaacagtaataatgtttcattaacaattaaatgtgcatcaattgattttgcattaaaaacatgaagtaatataacgcaactcgtaatgacaccttcttgtacttttaatacgacagttaatggtataaataacaatacgataataccgagtacaattggactctgacctaataaactaaatattgctgaacctaaaaacaatactaaaaaacatgatactaatcttgaaataatcgcttgtagcgaatgtacttttgtatgtttaatacataatacgactaatatggcgcttgaagcataattatctaaacctaacagcttactaataattacacctaaagtcatacccactgctgtttttattgttctaaatccaatcttgtaaggatttaactttaacatgggttagcgcctcttatctttcttcacaatatttattgaataatgtttgtaattgattaattacgttcatcacatcatgaccttcgatttgatgtctttcaatcatttctgtaatctttccatcttttactaatgcaaatgacggacttgaaggcgcataaccttcgaagtattcacgcgctctttgtgtcgcttctttatcttgtccagcaaatactgtcactagacgatcaggtaatacgtcataatgtaaagcatgtgatgctgctggtcttgcgataccacctgcacaaccacatacagaattgatcataactagtgttgtaccatcttgtttaagaactttgtcaacatcttctgcagtagttaattgctcatatcccgcagattcaatttcattccttgcttgttctacaacaccgttcatgtataaatcgaaattcatgtccataagttcaatcacctatccctttatatttaaactatcctcattctactaattaataacatattgttcaataaactaatctgaatcacacctatatttagacacaattttaacaatataccaaacattattgtgcttaaaatcatggtaactaatttgttcacatgttttcattaatatgtttcaagtatgatgtcttattttgactttactgcaaaaatgcattcaaccatgttgattattgttctttatcttttttgaatatattgcacatattttagtgccaaaaaataatacatccatcgacaagaacaagataaaacaagttgtcgatagatgcatctatgttatcactaatatatatttgtattttctaaagtatactgttcgatacgctgtttaatatgattcataaatttacctgtttgtaaaccatctaaaatacgatgatcaattgaaatacataaattaaccatgttacgaattgcaatcatatcattaattactactggctttttaacgattgattctacttgtaaaatcgctgcttgtggatgatttataatacccattgatgatactgaaccaaatgtaccagtattatttaccgtaaatgtaccgccctgcatatcttcagctgtcaattgcttattacgcgctttcgttgctaaagtattaatttctctagctatacctttgattgacttttcgtctgcatgcttaatcacaggtacgtataatttattttcatcagcaacagcaattgaaatattaatgtctttatgtaagacaatttcatttccttgccagctactatttaataaaggatatgcttttaaagcatctgctacagcttttacaaagaaagcaaagaacgttagattatatccttctttatttttaaagctgtttttataatgatttctcgtattcacaagatttgtagcatctacttcaatcatcatccatgcatgtggaatctctgttacactattaaccatattttgcgcaattgctttacgcacaccatttactggtattgtgctgttttcactattgtcttcagatgattggttacttgatgtatctactgatgttgattttgtttgaacttgtttgtcagattgagctgtggtaccaccattttcaataactgacattatatccttcttagttacacgaccttcaaatccactacctacaacttgtgataaatcaatgtcatgctctgaagcgagtttaaatacaacaggtgaaaagcgaccattattacgtggttgattttgtttagcagtagatgtctgttccactgttgcactagcttttttagtagatttctgagtatgctcatccacttttgcttgtatctcttcagttgtttcatttgtcttttcatcagcagtttcaattttacagataattgtatcaatagctactgtctgccccgcttcaactaaaatttctgtaattgttcctgatatcgtggaagggacttcagctgtcactttatctgtaataacttcacataatggttcatattcatcaatatgatcaccaacagaaactaaccattgttcaatggtgccttcatgaacactctcacctaacttaggcattgttatttccatgactttccctccctagaattctgctaattcacgcattttatttaagattttttctggattcatcataatttcattttctaatacaggagaaaatggcatagatggtacatctggagcagctaaacgcatgattggtgcatctaaatcgaacaagcaatgctctgcaataatcgctgacacttctgacataatactaccttctaaattatcttcagttacaagtaaaactttacctgtatgtttagcacgatcaataattgtttctttatctaatggataaacagttcgtaaatcaacgacttcaacattgataccgtctgcagctaaaatatccgctgcttgtaaacaataattgaccattaatccataacaaaatactgttaaatcttcaccttcacgtttcacatctgcttttcctaaaggtacagtgtaatattcttctggcacttcttcctttaagaaacgataagcttttttatgctcaaagtacaatactggatcatttgattcgatagatgataataaaagccctttagcatcatacggtgtggaaggaataacaattgttaaacctggcgatgaagcaaatatactttcaatactttgtgaatgatatagtcctccgtgaacaccgccaccaaatggtgcacgaatcgttaatgggcattgccaatcattatttgaacgataacgcattttcgcagcttcactaataatttgatttgtcgcaggtaaaataaaatctgcaaattgaatttctgcaattggtcttttacctaccatagctgcaccaatggcagttccaacaatatttgactcagctaatggcgtatcgataactctgtcttcaccatatttttgttgcagtccttgagtagtaccaaatacgccaccttttctaccaacatcttcaccaagaataaacacatctttattttgttgtaatgctaagtcttgtgcctggcgtatcgcctctaaataagataatttagccattagttaagactcccttcttcgtacacaaatgcataggcttcttcgacacttggatatggcgcgtcttcagcagcctttgtcgctttattgatgatgtctttatgctccgcttctatttctgccaaccaagcatcatcgataatgccagctgaaagcaactcttttttgaacttttcattgcagtctgcttttttaagcgtttcacgctcttctttcgtacgatattggtcgtcatcatctgatgaatgagctgtcatacgacttgttactgcttcaatcaaagttgaaccttgaccagaaatagctcgatctcttgcttctttcatcgctttatacattgctaatggatcattaccatctacttgttcaccatgtataccgtaaccaagtgctctatccgataatttttcagctgcgtattgtaatgaatcaggtactgaaattgcatatttattatttataatgacacatacaaaaggaagtttgtgtacacccgcgaagtttaaaccttcatggaagtcaccttggtttgagctaccttcaccaacagttgctgttgcaattttcttcttaccatccatttttaaagctaaagcagcaccaacagcatggggtatttgagttgctaccggtgaactttgagacaaaatattcttagctctactactaaagtgtgatggcatttgttttccaccagagttaacatcgtctttctttccaaacgctgataaaaacgtatcatacgctgagatacccatataagtaacgaaagctagatctctataataaggcgctgtaatatcaccttcttctaatgcgtatgccatcccaatctgagttgcttcttgtccttgaccacttacaacaaatggaattttacctgcacggttcaataaccacagtctttcatctatttttctacctaaatccatccatttatatattacttttaggtcttcttcgctaaggcctaatgatttataatcaatcatgttaaatcctcctatttatacgtgaatagctctactttctgctttcaatcctaattccatcaacacttcagagatggaaggatgtgcgtgtgttgttagtcctaattctaatgccgagccattcatgaactgtaacagtgatgcctcattaatcaattctgttacatgtggaccaatcatattaatacccacaatttcttcagttgattgatcaatcaccatttcgctatacccttcgtttgtgtcatggctatcaatcactgctttaccaattgctttaaatggtactttaaaacttttaactttcattccctctgcctttgcttgttcaatgtttaaaccgatagaagcaatttcaggttgtgaataaatacacttaggcatcatgttatagtttactgggattgggttcccctcaaacatatgatcaacagccacaacaccttcttttgatccaacatgtgccaattgtaattttcctatacaatcaccagctgcataaatatgtttatcttcagtttgttgaaattcgttcgttaaaatatgtcctgatgttgaaagttttattttagtgttgtttaaaccaatatctgatgtgttaggttttctaccaatcgatagcaacactttatctactttaattatgtctgaggaaatttcaaacgtaacaccatcttcgttaacatttatatcattttcagaaagttttattccctcatagaatttaacaccacgtgctgacaatgatttttttaatagttgtgaagcttgtttactttcagttggtaaaattctttcacctgcttctataactgttacgtcaacacctaaatctatcatcaatgatgcaaattccattccgataacaccaccaccaataataccaatacttgatggtaacgtctttaatgataatatatcatcgctagataaaattttatcatgatcaaatgataagaatggcaactctgcaggcgaagaaccagttgcaattaatacaaattggttgggtaataagtctgattcaccatcttcatattcgacagaaattgtgccactttgaggtgaaaatatagatgtacctagaatacgtcccgtgccattataaatgtcaatgtgattgtgttgcattaaatgctttacaccttgatacatttgattaataatgtcttcttttcgtgccaacatattttcaaaattaacattagcatctttgacatcaacgccaaacattgctgcctgttttactgtttgaaatacttcagcagatttaagcagcgatttagtaggaatacaacctttatggagacaagtacctcctaatagttgtcgttctactattgccacttttttacctaattgagacgcacgtatcgcagcaacatatcctgcagtacctccaccgagaacgactaaatcatattgtttctctgacatgttcttactcctaactaatgatatatatccattgaaaatttattaatacatagttttcatgtccattaattacctattttacatgattgtctatttagtttgaatgcacataaataaatccataaatgagtattcaacacactttggaaattatctacgtctttgattgtgttgtatcatttctcttgcattttctcgagttaaatcagtaacacttgcacctgaaatcattcgtgcaatttcatctactttatcatcgctaattaactcttgaacttgtgttgttgtacgatcatcttttgatgatttcgaaattaataaatgatggtcgctcatcgatgcaacttgtggtaagtgagagatacaaataacttgtatatattctgctatatctcgcattttctctgccattttttgtgcagcttgtccagatacacctgagtcaacctcatcgaataaaattgcagtttgacctctcgatttaacaaaaatactttttaacgctaacataattctagaaagttctccacctgacgcaattttatttaaactttttaatggttcccctttatttggactgattaaaaattctacaaattcgattccatcaatattcggttcttctaattttttaaatgaaatctcaagatttgcgtctttcatttgtaagttttgaatttccgatacaatgtggtctcttaactccctagcgactatacgacgctgctttgataacgcttgtccaacctctataacttgattatacaatgcatttatttcttctcgtaactgcgatgtactttgttcatagttttcaattttattgatttcattattaagcttttcttgatatgcgattaattctgaaatatcttttccatatttacgttttaaattattcagcaaattcatacgagattcatactcgtttaacacttgttcgtcgaattctgtattagccatttcatcatataactcatgttttgcatcttctaaaatgtagtaaaattgatcaatatcttcttttaatttgtcatatttgtttggaactatatcgtttattgttaacaaatggttgcttagttcatataaacgatcagtgatagcattttcatccgttaatgtcatatgtgcgttattaagcgctaagcttaatttttcagagttttgaatgcgtttaatatctatttcaagttgctctatttcgccttcttttagatgtgcttcagacaattcttctaattggaatttcattaaatctaaacgctgtagcaatgcttggtctgctgattctaaatcttctaactcttgctttttggctttataattttgaaaagtttggtgatatttatccaacaaatcttgataacgtgattctgcgtaattatccaataatgttaaatggtatttttgtttcaacaaagactgcgtttcatgttggccatgaatatctaataattcttgcataacttttcgtaaatcttgtaaagtaactgtttgattattaattttacaaagacttttaccagagctgaaaatttcccgtttaactaataaaaaatcttcatctacatcaatatccatatttttcaatatatgtatagcatctttactctcgtcaatatcaaatataccttcgatgacagcctttttttcaccatgtcttacaaaatcagatgaagctctcattccaattaattgtccaattgcatctataataattgacttacctgaacccgtttcaccacttaaaacagttaaaccatcagaaaattgaatttctaattcttcaataatagcaaattgcttgattgataaggtttgtaacataaactcatcgcatccttataacaaattgaaaattcttgacttgatttcatcacttgcctctttgcttcgacaaataattaaacaagtatcatcaccacaaattgtgcctagtacttcttcccaattgatttggtctaatatagctccaatagattgtgcattaccaggtaatgtttttagaacaagtaaattatcagtaccatctatattaacaaaggaatccattaaataacgtcccaatttttctaaaggatggaattttctatcatttggtaaactataaacatattgacctgaaggtataggtactttaataagttgtagttctttaatatcacgagaaacagttgcttgagtgacatttaaatcataatcgtttaatcgtttaactaattcatcttgtgtctctatctgttcatttgaaataatttctctaatttttatatgcctaaccgattttttgggcacagtaaacacctctgattacgaatatttatacatttattttaacacatgcactgatttacgactactaaacacctttacgtaaaaagggtaaacatggtttatctatcttggttatctatttataaatatttttcatattacgcataacaattgcttaaaatatgtataaaaatgaatatatgtgtaataaacttgctaattattagatttaataagcgtcaattgtttgaacatatttaattaaaatcacattgatatcacagatacgaatattgtcgtatagaaattgaaaattctattttttaaatgaaagtcttcaacataattttaagtttcaacatgagaaaaatcgattaacaaacaacgtcagttgaatatgccttttgagacatttcaaactttacaattgttgctaatcgatatatttgcttttagtgatccctgctataaaataaatcaacgatttctaataagtgttttgtattgaattgttcatcaatttgcgttagttcatccactgctgcgtctctatgataagtcaatttatcttctgcgccatctttccctaataaactcacgtacgtacttttattattttcaagatcgctgcccacttttttacctaactttgcttcatcaccatagcagtctaataaatcatctttaatctggaacatcatacctaaatgataactataactttctaaatgttctttagttgtatcatcgacattagcgatatctgctgcactcataaccgcaaaagttaataatgctcctgtttttgttttgtgtatcatttccaaagtttcaagatcaattggttggccttcgctttgcatatctaacatttgaccgccgaccattccaacatgaccacttgctattgacagccgttgtagaacttttatttttacttcatcagttaatctatcatcacttgaaataagttcaaatgctttagttaataaagcatcacctgctaatatcgcagtccactcaccatatactttatgatttgttaattttcctcgtcgataatcatcattatccatcgctggtaggtcatcatgaataagtgaatatgtatgaatcatttctagtgcaattgcgctcttcatacctaactcatactcggtatttagtgaatctaaagtgagtaataacagaactggtcggatgcgtttacctccagcatttaatgaatacaacatactttcttctagctgagtatccattactgatttatttatcgcaaccgataattcattattgacttcatctattaatttattcatcggtagattcgtcattttttacatcctcagcttcttcttttattaagtcattcacctttttttcggcattttttaaagttgtgtcacaagctgctgatagtttcataccacgttgatataaatctaatgattcctctaaagatactgtttcattatctaatttttgaacaatttgctctaattcttgcatcatttcttcaaaactttgcgtttctttagtcattattacaccttactttcgtaacttttgcatctactaagccatctttcattgttaatgtcaattgatcattttctgttaaatctttagtactcgtaatgacttcgtcttttttattaacaattgcatatccacgcaacattgtattagttggacttaaattgtttaagttttctactttatttttcaaatcatttttataacttaatatcttagaattcaataatttaacaagttggtttgtcaattgaagattattttgttgttcttgattaacactacttagtaatgcttttaaattataacgttgttgcaacagcattaatcgatgtctctgttgttcaaaagttgcctgaatttgttgtttcagtctcttttctaaatcatctcgacgttgtatctgttgatcatacaataaagttggttgtttaaacttgtaatacgatgacaaatgttcaacatgtttacgttgttgttctaaatgtttcttgatgaaacgagtcaatgtaaactgatattgctgtatttgttgcagcaattcatattggtctggtgttgcaataacagcagcttgagttggagtcgcagctctgatgtctgcagcaaaatcacttaatgtaaagtctgtttcatgaccaactgctgatataatcggtgtcttacaattatatattgcacggacgacagcttcttcgttgaaattccataaatcttctatggatccaccgcctcgacctacaataatggtatctacacctaaactatctgcatattcaattttttcaataatgtcgtcttttgctttttcaccttgaaccaaagtactaatttgtatttgttcagctaatggaaaacgactatttatcgttgaatggatatctcgaattgcggcacctgtactcgctgttaaaactgcaatttttttaggaaacttaggtattgatttcttattcgctttatcaaaacaaccttcttcagttaattttttctttaatgcttctaatttttgatataagttccctataccatctaattgcattttatttacataaatttgatagtttccacgacgttcaaaaacagaaacacgtgcttctaataagacttcatctccttctttaggttcgaagtttaatttagaagcactacctttgaacatcatggcacttataacgctttctttatctttcacattaaagtataaatgaccacttgaatgctttttgaaatttgaaagctcacctttaatcaatacagattggagatgtggatcttgatcaaatttatatttaatatatttcgttaaagctgaaacacttaaataatctgacatataacatcactcaattttatttttttatattactcaatacaccatttataaatttataatgatcatcatcactgaattgttttgttaattcaactgcttcattcattacgactttagcaggtgtatcactgtgtaatatttcatatgttgccattcttaaaataatacgatccgtttttaataaacgtgcaatagtccaatcttttaaataaggactaattgtctcgtctaatacaggttcgtgatctttaacgccagaaactagccaatgaataaattcgaagtctaaatctggattatcgtctttaataaagcttatcgcttcatttatcgttaaatcactgtccttcatttctaattgaaataaagtttgaaaagcttgcactcgggattctttacgactcatttttaactccttcaaacgtttgtatttttctttatttaattactgaattaggtatgacattacttttcaataacgatttgtgtaatgtgaatattaatttgcttaggttctatcgctgtcatattagaaattgaattaaaaattgacgtttgaattttgtttgcagtttttgaaatattaacaccatgttttaatgcacaatatacatctatatatatgccatcttctttactctcgatttttaaatcacggcttaaatttttacgactaactttttctaaatttgtttcttttaattcagcaaaatggccagtgatgccttcgacttccgaagtagctatacttgcaataacagatagcacttctggcgctatttctactttacctaattttgaatttgaataatcagttactttgaccatggattgacctcctattaaccttcatcattcataatgctattttgctctaaaaagtttgtattaaatttaccgcttctaaatatatcgttattcaataatttaatatggaatggaatagttgtatcaataccaagaaccacaaattcacttagtgcacgaatgccagccataatcgcttcatctcgtgtcggttcatgtatgattaatttcgctaccatcgaatcataatatggcggtatcgtataattagtataacatgctgactctattcgaacaccatatccacctggtgcaagatattgctcaattttacctggtgatggcataaagttcttgtaaggattttcagcattaattctaaattcaattgcgtgtcctgttaatttaatatcttcttgtttatacggtaacacgtcacccatagcaacttgtaattgtaatttaactaaatcaattcctgttaccatttcagttacaggatgttctacttgaatacgtgtattcatttccataaaataaaatttattatcatttaaatcatatataaactcaattgttcccgcattttcataatttacagctttcgctgcacgaactgcggcatttcccatttcacgacgtgtttcatcatctaaaattggggaaggtgcttcttccactaatttctgcatacgtctttgaattgtacaatcacgttctcctaaatgaattacattaccatagttgtccccaacaatttggatttcaatatggcggaagttttcgatgaatttctccatataaagtccaccattaccaaatgcagtttgagcttcttgttctgtcattcggaagccagtttcaagttctttttcatcacgagcaacacggataccttttccgccaccgccagcagtagctttaatgatgaccggatagccaatttttttggcgattttcttagcttctgagacgtctttcattaaaccgtcactaccaggaacaactggaacattggctttgatcatttctgccttagcaacatctttgatacccattttttggatagattgataacttggtccaatgaacttcaattggcatgcttcgcataattctgcaaaatcagcattttcagctaaaaagccataacccggatgaacgccatcacaacctgtagaagttgcaatagataagatgttcggaatatttaaatatgaatctttagacaaagtgggacctacgcaatatgcttcatcagcaatttgagtatgtagcgcatctttatccccttcagaatagattgcaacagtttggatgcctaaatcacgacaagcgcgaataatcctaactgcgatttcaccgcggtttgcaattaaaacctttttcattatttcaccttaaataacggttggccatactctaccatttgtccgtcttctactaagatttcaacaatttcacctgaaatttctgcttgaatttcattaaatagtttcattgcctctaaaatacacactgttgtttcatttgaaacagtgtccccaacttgcacatatgcttcttcgtctggagatggcgatttgtaaaatgtacctaccataggtgcattaattgttttgtgattatctgaagttggctttggagcttcagttttattgctatcagttgattgtgcttgaggcataggcattgccgcagcttcaactggcatttgtgagatttgtggcgtgataatctcagtttctttttctttcttaagcgtcactttgcctttagtatcttcaatattgatttccgttaaagttgatttatccagaatttcaattaattctttgatttctttaaagttcattattactgactccttcagtttgttttcatctacccgtctattttacttgagacaactcttcaattcaagcatgttcatattgctggcgacattataagtctatcccaaagttataataaaaccacattttaaattaaaaacacttgtgtatttattacttaacattgactcatcttaactcttgattaaaaattttatgcattcagttaaacatatcaatgttatttttattagctattatgttttatcctcaacaatatgatatgtagatatatacctttactcatgtctatgttttttcactaccaattagacgattcgttttatattttaaaaattattttaaaaataaaaagcctcatatcagcatataacctataatcattttaggcaatagctttatgagacttatttagaatatcttacgttaaatcagtatagtgaatacaagctatttgttaacaaattagagattatcctcttgaaatgtagcttccatcaccagtgttgataattaaaacgtcaccttcgtttacaaataaaggtacatttaatgtataaccagtttcaacagttgccgatttagtggcaccagttgcagtatcacctttaataccaggttctgtttcagttactgttaattcaacagttttaggtaattcaacaccgatagtttcaccttcgtatgtttgaatttgtacttccataccttcttttaagtaattcaattcttcttttaagtaatcacttgaaagttctgtttgttcaaagctttcattatccataaatacatgattatctccgtcagcatataaatattgcatgcgacgattttcaatcattgctggttcaactttttcaccagctctaaacgttttctcttgaattgcaccagttcttaaattacgtaattttgaacgaacgaatgctgaacctttaccaggctttacatgttggaagtctataactttccaaatagcgttatcaacagaaattgttaaacctgttttaaaatcattaaccgaaatcattcagtttcctcctcattttacacgcttatgttaaaactataaggtcttttgtgcatttagtaaagacttgacaaccattttctgtaattaaaatatcatcttctattcttataccgcccaaaccttctatataaacaccaggttctactgtaacacagttgttaacttgaagtttatcttgtatcgtacgagccagcattggcccttcatggatttctaaaccaataccatgtcctagtgaatgtccaaattcttttccatacccttttgactctaaatagtttcttgaaatggcatcagcttctgcaccagtcatgccaggtctaatctcattaattgctttcatttgagattcaagtactatttgatatatttctttcagtttaggatctggttctccaatagcaaatgttctagtaatatctgaacaatagccgttataatacgcgccaaaatctaatgtaatcatgtcgcctttttcaataattttatcacttgcaacaccatgtggtaatgcacctctatgaccagatgctacaatcgtatcgaatgatggtccatctgctcctaattctagcattttgctttctaatattgcctttaattctttttcagtcatgcctgcttttacaacagttaaaatatattcatatgtttcatcaacaatattagctgctttttgaattaaagcaatttcgtcagcatctttgacgtctctaattttatctacagtattagaaatgcttattaatgatatacggcttttatttaattcaaggtatgtatcataacttacatgatgcccctcaaaacctacattttcaaaattttcttggtgtagcaattctttaatctcaccaataatagtagatttacgattaataatttcataatttggcgcctgcttagttgcttgatcaatatatctaaagtctgttatcaaatattgtttatctttagatatgataagtgctccactggtaccagtaaaacctgataaatatcttctattgtaatccgaaagaatgataatcgcatctaaatgtttttgttctaaaatacgatgcacttgtgttattctgctcatcttattacctcctagtgaaacgtttgtgcatttcaactttatacattaaaataatatcataataaggataaaaaataatagatattgattttagggagatagtaatgaaaaaattggtttcaattgttggcgcaacattattgttagctggatgtggatcacaaaatttagcaccattagaagaaaaaacaacagatttaagagaagataatcatcaactcaaactagatattcaagaacttaatcaacaaattagtgattctaaatctaaaattaaagggcttgaaaaggataaagaaaacagtaaaaaaactgcatctaataatacgaaaattaaattgatgaatgttacatcaacatactacgacaaagttgctaaagctttgaaatcctataacgatattgagaaagatgtaagtaaaaacaaaggcgataagaatgttcaatcgaaattaaatcaaatttctaatgatattcaaagtgctcacacttcatacaaagatgctatcgatggtttatcacttagtgatgatgataaaaaaacgtctaaaaatatcgataaattaaactctgatttgaatcatgcatttgatgatattaaaaatggctatcaaaataaagataaaaaacaacttacaaaaggacaacaagcgttgtcaaaattaaacttaaatgcaaaatcatgataggagtcttttaatgcgtaatataatattttatcttgtacttattattgctgcgattggattagtaatgaatctagatgcctttattttttcaatcgtcagaatgttaatcagctttgctgtaatagctggtattatttatctgatttattatttcttcatcttaactgaagaccaacgcaaatatcgcaaagcaatgcgtaagtataaaagaaatcaaagaagaaaatagataaaaaaacggaagcacttgtaggtaaaatagtctacgtgcttccattttttattctaaaaactactttctaaacatccattcatctgaacgatatttttcagttaattcttccacttctgccaattgagcttctgttaattcaagtggcttaaattctatatttaaacctttcttaaaacctttctcgaaagcttcttccatttgactaatagtaatgtgttcatctgaaatatcattgatggcaactgctttttcaacgaatgcctctttcatttttaattttaatctttcatttttataaataaacatatcaaacagttcatcaatatcaatatcttgtaaaatcgaaccgtgttggaggattacgcccttttgtctcgtttgagcactcccagcaatcttacggccttcaacaactagctcataccaacttggtgcatcaaaacacactgaacttcgaggttgttttaatttttgacgctcttcaggcgttttaggtaccgcaaaataagtatcaaatcctaagtttttaaatccttctaataatccttgtgaaatcactctgtacgcttctgtaactgtagaaggcatattcggatgcgattcaggcacaatcacactgtaagttaactctttatcatgtagcaccccacggccaccagtttgacgccttacgagaccaaaacctttctctttaaccttatcaatatcaatttctttttgtagcctttggaaataccctattgataatgttgcaggattccatgtgtaaaaacgtataactggatcaatttcacctctagagacaaaatttaataacgcttcatccattgccatattataatatgggtctttacttcctgtattaataaaattccaagtttcagtcatattcaagaactcctatcagcaaaatgtataatatttgattcgctaattaatcaatttaactaaatgaataataattgcaattctttagtgaaatattttgataatttgacctaacagtcttataattatattatcgtttaattagggaggatgcaagatgagtgctagtttgtacatcgcaataattttagttatagcaattattgcttatatgattgttcaacaaattcttaacaagcgagctgttaaagaattagatcaaaatgaattccataatgggattagaaaagctcaagtcatcgatgttagagagaaagttgactatgactacggtcacattaatgggtctcgcaatattcctatgacaatgttcaggcaacgattccaaggattaagaaaagatcaaccggtatacttatgtgatgccaatgggattgctagctatagagccgctcgtattttgaaaaagaatggatatacagatatctatatgttaaaaggcggctataaaaaatggactggaaaaataaagtctaaaaaatagtttttgtaaatttaatatacgatttaataaaatctgagtgttaattgatcatcaataacaatactcagattttaattttttaacaaagtctgttactatatttctctagcttcactgatcattaaacttagtttcagcataataaagaaagttcagctcattttcaatacgattcaattaccgcaatctaaaaaatgaaaagacaatttctatgaaagaataataccaaaccctaagagttattacttcggtttagttttcttgtttaaatagaaattgtctttttcaattgattttgaaaccattatccttaaatcttcatacaaagttagaataataattctcggaatatgtgtttaatactttatttttcctgtttaagattttcaaactttaatattggtttacgagcagctgtagcttcgtctaatcgatcaatcacagttgtatgtggtgcttctagcactttatcaggatcatttttagcttcttcagcaatactaattaatgtatcgataaaataatcaagtgtttctttagactctgtctcagtcggttcaatcatcataccttcttcaacatttaatgggaagtatattgttggtggatgtacaccgaaatctaataatcgcttagccatgtctaaagtacgtacaccaaattctttttgacgcacaccacttaacacaaactcgtgtttacaatattgtttataaggtatttcaaagtgtttagataaacgtgctttaatataattcgcattaagaaccgctgcttcagaaacctctttaagtccagttgctcccatagttcgaatatacgtataagctcttaagtaaataccaaagttaccataaaatggttttacacgtccgatagaatttttaatgtcattatcatatttaaatttgtcgccatctttaataaccattggctttggtaagtaacttgctagttcttttactacaccgactggacctgaaccaggaccgccaccaccatgtggaccagtaaatgttttatgcaagtttaaatgaacagcatcaaatcccatatctcctgggcgaactttgtccataatagcgtttaaattcgcaccatcataatataatagaccaccagcattatggacgatttcacggatttccataatatttttttcgaaaatacctaaagtgtttggattagttaacataatagctgctgtattttcatttacaacacgtttcaagtcatcaatatcaacttcgccacgttcgtttgattttacagtaactgatttaaatcctgcaaatgaagctgaggctggattcgtaccatgcgcagaatctggcacaatgacttcatcacgatgaccttcaccattattctcatggtaagctttaaatatcatcaatgcagtccattcaccatgtgcgccagcagctggttgtaatgtcacctcatccataccagtaatttcttttaattcttcttgcaaactataaataatttctaatgaaccttgaacttgatcttcatcttgtaatggatgtgattcactaaatcctggtattctagcaaccttttcattaattttagggttatacttcatcgtacatgaacccaatggataaaatccgttgtctacaccgaaatttttatttgaaagttcagtataatgacgtactaagtctagttcagcaacttcaggaaactccgctttgtttttacgaataaatttatcatctaacaatgactcaacagaatttgttttaatatcactttttggtaatgaatatgcatatctgccttcacgtgatctttcaaaaattaatggacttgatttactagtcatttaactcaccagccttttctacaaatgtatcgatttcatcttttgttcttaattcagttacagctattaacatgtgatttttaaagtcgtctgaaacaacacctaaatcaaaaccaccgataatattgtacttcactaattcctcgttaacttgttgaattggtttgtcaaatttgactacaaactcattgaaagatgtaccatctaatacttcaaaaccttttttaataaattgttgtttagcatagttagcatgttctatattttgaactgcaatatcatagataccttgtttaccaagtgctgacattgcaattgatgacgctaaagcatttaatgcttggttagaacaaatattagatgtcgctttatcgcgtcgaatatgttgttcacgtgcttgtaatgttaatacaaagccacgattaccttcatcatcttgtgtttgaccgactaatctacctggcactttacgcattaactttttcgtcgttgcaaaatatccacaatgtggcccaccgaattgagcaggaattccgaatggctgagtatcacctacaacaatatctgcaccaaatgaacctggaggtgtaagtaatcccaatgctaatggatttgcatatacgataaataatgcttttttatcttcaataaagctatgaatcttttcaagatcttcaattgaaccgtaaaagtttggatattgtactgcaacagctgctgtttcatcatccactgctgcttctaattttttcaaatctgtaacagtgccatctaaatcgatttccactacttcgaattccttacgcgtcttagcataagtatgaagtacttgtaatgcttgataatgtaaaccttttgagactacaattttatttttctttgtttgactaaatgctaagatacatgcttcagcaaagctagtcatcccatcatacatagaagaatttgctacatccatatctgttaattcacaaattaaagtttggaactcaaaaatggcttgtaattcaccttgagaaatttccggttgatatggcgtatatgctgtgtaaaattctgatcttgaaatcatagcatccacaactgatggcgcgtaatgatcataaacaccagcacccaaaaatgatgtatgcgtttctttagtgatattcttgcttgcaatgcgatttaatcttctaagtaacgttgtttccgcttcgccttcagcaatatttaaatctctatttaataaaatgtcacttggtacatcaccgaataattctcctatagattttgcaccaattgtttgtaacatttcttgcttgtctttttcagttaaaggtatataacgatgactcacaatgcacacccctttttaattatttatcaatttgatttttcttaacaattttcgcttttaattgacgcttacgaacttgaacaagcaactctctacccatttcaaactcatctctttttatcattgcaagtgcaattgattttcctgatgatggagactgtgttcctgaagttacttctccaataatatttccatctaaatccataacttcataaccagttcttgcaattcctttttcaagtaattctaatcccactgttcttcttggtgcaccattttctttttgatcttttaatacagatttaccaataaaatcagcatcaattaatggtttacttacaaaagcgataccaccttcatatggtgtaattgattcagttaaatcttgtccatgtaatggcaatccagcctctaatcttaatgtatcacgagcgcctaacccacatggcataacattatactctaataaaccatcccaaattttttcagtatcatcgatattacaataaatttcaaacccatcttcacctgtgtaacctgactgagataaaatgacgtttgctccaaataatttgacaccctgtttaaattcaaacattttcatttcagttacatcttcatcaactaattgattaattaaatctctagcttttggtccttgtattgctaattgaccatattggtttgatacattttgtacttcaacatcaaatttctctttgtgttttaaaatccaattaaaatctttttcagtattagcagcattaacaactaataaataattgtcgtcagctaatttatatattactaaatcatcaataataccgccttcttcattacataaagcagtatataatgcttttgaagtagttaaattatcagtatcatttgataataaatattgcacaaactgactagcatctttacctgttacttcaatttcacccatatgactaacatcaaacaggccaatttcgtatcgaacagcattatgctcctctttaatacttgaaaattgaacaggcatcgcccatcctccgaattccacaatttttgcacctctatcaacataattttgatataaaggtgtttgttttaaatcacttgacattgaaatacccccttaaaattataaaaacaggatagcaatcgctaccctgtttataaatcaccaattcaggaacgcgttacagtattatccttttgcctgagagtttcgtaataaattacttgcaccttcggcgatagagtcttaacgctctattctctctaatactgatcactcgcttttattaaatttagcaattcataatatatttctgaaattgatagcaaatgactatcaaatttcttgaatgcgatttcattatatcttaaattccgcgagcaatacaagtcatttaactgcttgattgtcttattatttgcattaggtcgatgtgggtcatcattgattcgactatatataatatcaatattacaatctaaccaaataatgtttttttgatttttcaaaaaattaaatgcctcttcactctcaataataccaccaccagtagcaattatatctgcagtgttaatacattcttgcaaacatgtgaactctaaattcctgaaatattgttcaccatgtttacaaaatatttctggtattgttaacttatacttctcttcgatatatgaatctatatcaataaatgataaattttgctcatctgcaacgtatttaccaatcgtagatttaccggtacccatgaaaccaattaaaattattggtgatttatcatgattcatgcgttttcccttctttcaataacaaaacaatcttatagttatagtcagtttcaatattatataatgtctttaattttaaactatattgactgatataaaaagtgaaaatggaaaaataaattgctgttagcatcaataagaacggcgtaacatatcctttttctttatataaatcaaaattaataaattatttcacatcctttttaatagtactcatttaaatactagtaagttatacataaatagttttagtctgcacatttgtaccgactttaactgttatcgttattttaataatggatttatagtagatatttgcagtaaatgctgtaacattattaatcattgttatatttcctctgtcatttacaactttaataattttattattaattaatttgtattcgatcatttcttcacctttatgtaaaatgatacggtgttgcctaatttcaatatcgtttctatctactcctttaaaatcatctagaatatctcttgagaaaaattcgaaatctacagttgttaaatccctactttcaattagaaaagttttactaagtctaattaagtctggaacaattagtaaagttatacttataaacatcatcgctactaacatttcaatgagcgaaaaagctttgacattaatactgtatacatgtcttttgataagaagtggtattttttgaaatagcacaaatttgttggtcactttgcttaatatcatacttccctatagttacccccttcttaagttcttctttattaattttagatacagtcgtcaaaattactttagaagcatcaattgtttgtagtttatggtttatactcgcttgcatttgattcatcattggtatcaatagtaatgtaatcaatccaattagcaaaaatccagccatactatctattaagaatgaacctttacacttatagcttttcataacgaattcttcctttttcaatatggaatattattctataaattgaattgttattgtaaattgttatgctaccaaatttattgatattcccttttttatcaaaggcaataatatcaacttttgcaacattaattattttgcctacttttaattttagaaatcgtattttattattctctattactttaatagtgtcactgttttcataaaatctaacattgatatatccttgatttgctatagcttgcgacttaatataattcaattcagtaataaaagaaatgatatttgcctcatcatctattactctaagattgcttaatcctttagatgtcattgtcaaaagtagaaatatactgattaacatcattaccacaagcatctcaatcatagtaaatgctgactgctttctaatttgcaactgcttctccattactaattgtgattgtctctcctgatttacatgtcttttgtgcttcttttataaaaccatctgcaattaagtcttcaatagacgatggatttctattatgtttcaatgcatacgcttcaatttgactattaaccatttttacctgtgcattacaacctgttgattgtatgtgagcagtttgtttagcaatatttggaatgattaaaattaataataaactgatgattaataacactaatagcatctctatcaatgtaaacgcttgagttttcttaagaaatttaaacatatattaacctccattattttatactttgcatcatttgaaacattggtaacataattactaaataaattgcgacaataaataaacctaaaatcaaaaataaaataggctgtaaaaactgagtctgttttatcgctttatcttctatttgttttactaatatttgcgaatataactttagttctacttctagcttccctctcttttcaccttgtagcacaaacttaattaattgaggcttaaagcattttagtttttctaaaatttgaggcaaaccatatcccatttctgaataagttaataagtatttacctagaaactgtctaaatggatcactactatggttaatataaacgtctactattgattgaagtgtaataccatttttataaaacaacactaattcattagttacaaaataagttttaaataattggaaatagcctgatattagcggtagtttcatcacaaagtttatcttattgagcatatttaaattgttataaattaatttcataataatagccaacatagatactattatgagcattactacaattatagtaggtaagctggtaatgaaaaaagacaatgttttttgaaaagaagatagttgaatattcatagaagtatataattgttgaaactgtggaattactgtgaggtttaatataataatcatagcaataaagatagaaactagtattaaggggtattgcagtgtctttaacaatcgttgttctgactttctattcactttcatataatttacggtttcttctagaacgtctataatattgccaaatctttctgccaaatatacttgcatgacgatagtatcgctataacctatcagtgataatatttgattgcatggtgcaccatttgaaatttcacttagaatggtggtacctaattgcttatttttatatgtcatttgaagatttaaaaattgaaaactttgatacagagtgaaaccatatttcaacaaattacataaatttgaaagtaagtcgatttgttgggccttacttaattgtcgcttcttagaatgtagtttaaatgtatttatgcattgtagtttcacaaatgacacctgcttttgtcatatcatcaagtttatcttctaagttcttaaatgatgatggtaatgaatgattatgggaaaagaaatatcggagttgttgctgagatagaatttcacatactaattgtcgctgttgcttaatagtagttacaagtcgttggtttataattaagttagttgcctgtatcaattcttgtacagaaatgcccatttctaatagccttaaaatagcacctttacaatcagttgcatgcaatgtagtcagaacaaggtgaccacttaaactagcctgtataacacacttggcaacatctttatctctgatttcacctattaaaataacatcaggatcacatcttaaaatagctttaaacgaatttacatagtttatgccagctttatcattcacattaatttggacgataccaggaatttgcatctctacaggatcctctatagaaattacatttaaattcaaggctttattcgcgtatgagaccatttgatacattaatgtactctttcctgaaccagttggtccactaaacaatagtaatccttgtttcttattcatgaggtgtttaaaatcattgaatttataagttgatttctgtggttgaaaaaattgaggtacaattctgataacacaactttcttggccaagtgacaatggtaaagttgatattctcaaaaaatatattttattgaaaaggtaactatatcgaccgctctgtgcgacttgctgtgtagaaacatcaagcccagcttgaaacttcatataaactaataacttttgataaatgctattcccaatttgttcatactgctccaagttatcattaattctaaatttaatacttacttcatttttaactggaataaaatgtacatcactcgctttcatttctatcgctttattaattatttcttgaaatagaatcttcaaaaaaacacctcctacatataatcacgtaggaggtgtttttattacttcaatttaaccgtgtaaaaatggatttaattgttcatcatcaaccgtcgtatatggaccatgtccagggaataaaggtaaatcgccttctaattcaaatattttatcttgaatagaatcaactagcgtttcataatcacctttatataaatctgtacgtccgattccattattaaataatgtatctccaacaactgcgaattcatcgaacacatatgttaaacttcctggtgaatgtccaggtgtgtgtaacacattaaacttaaatccttctatttctgtgctaccttcgtttaacttttcaggagttaccttacttgtaataattggtaatccatattgcttaaatttatctgccccatttttaacgggatcttttagaaaatcaaactctgcttcatgcatataaaccgggacatcgaatcgatcaactatatcatcgactgctccgatatgatcaaagtgtgcatgtgttaataaaatagcttttaacggtttatttatttggtttaattttttaataattttttcactttcacctgaagggtcaatcagaataacagctttgtcattttcgatgaaatacgtattagtatcaactaagcctaaagttaagcttgaaatcctcataggttttcaccactattttctaaatgtttttgtactgatgttagtttatcattcatttttctagatttgtctcgtcggtcatcaatacggatatttgtacaaactctacttaaacctttatcaaaaggtaattcatgtatcacttgcacaacttctaatacatcgcttaattcaccttcaattagagtattcattggtgttaattgaaaatcaattttacccattgctttatattcttgaagttttttctgaatatctgcaatatatttactaacactcggaccttccgttccaactggaataacaaccacatcaacaatagccattattttaccccctctttatctaatacataggtcttgattaatcctgctgctcctgtaatacctgcatcattacctaatttcgcttgtacaatttcagtttcaaattgagcaggtgcaaatgttaaattatgatattctgttttaatattttcaattaaaataggtcctgcagtagacattcctccacctagaacgatatatttcggattacttgtaacactaataatactacataaatatccaatatagtttgcaaccttttcagtaatgaaaatacagaattggtcaccagcttttgccgcatcaaaaacagcttttgctgtaaccttattttctttaatcaattctaatatagaagatctaaacgtcaacttcggatagtagaagttaactaagttaacaacgcctgtcgctgaagcaactgtttcaatacatccagaacgaccacaattacatttaaatcgttgatcgaagtctgctctaaaatgacctatttctgcgccagagccattatgaccatgtacgatttcaccatttgaaataattcctccacctagacctgtaccaagtgtgatggcaacaacatcatcggcaccttcaccagcacctttgtgtttctcccctaaagcagctatgttagcatcattatctacatacactggacaatcaacgaactgttcaaaaatctcacgtacattaactttttctggccaatataagtttactgctccatttactgtacctttttcaaagtcaacaggacctggtacaccaatacctacgccaagtacatttgaaaaattataattattttcatttactttttcaacaaacgaatcataaattcctttcaaaagtgtatatcctgtactatcagatgtatcagtgtgaatagaccatttatgtaattgttctaattcaggtgtgaaaatacctaatttacaagtcgtcccgcctacatcagctgctaaaataatttttgtcatttctgttcattccttctctgattaattatcaacgtacatttcaaatattcttccttagataacagttcatattgatacaatgatgaaatctcctgttgaatcatttcgtacatatcttctggatttttaaaatatattagaaatccgtaacttttcaataactgttgtacatcataaaagttatttatttttcgactcatttgatttagtcaactctttttctaagttaatataatctgtatttttagggtctgcatttaatgctttacgcacatattttaatgctttttcatcatcatttaatgaacgatttgctatcgctaactcaaaatttaataaacctgatttaggaaacattctaagtcctcgctcccattctgtcataccttcggacttagaattgatagtagccataatcataccacttaaataatatgtttgatcatcggcataatttttatttattgtctgcttcacaatattttgagcattatcataattaccactagtcatatcatctttgatcaatttattataaatattatcttctttaattgtaaaaattctaatttgaagtgcaataaatataacaagcataccaattagtaaaatccaaaaaatattacgattcactttatagtaatagccaattaaagttattaataaaccaccaatgaatcctccaatatgcgccacaatatttatatttgacataaacagagaaacaccaactaatatcactaatgcaattaataactgtcctaacatttttttgttaaatgtttttgaaacatacatcatcgcaaaaattgatccaatcagaccaaatatagcaccactagccccaactgaaattgtagtcgtattaaatgatagtgatacaaagtttccaaacaaccctgcaataaagtatacagttaacatccgccatgaaccaataattgcttcgactattttaccaaaaataaataatgaaagcatattcataagtatatgttcaaaactaaaatgtaaaaacatcgatgtaacaattcgataccattcaccatgtacgacattaaaatgcactaacccgccaacatctaataattttacatccgaaaaattatttaaatataaaatcatacataaccatattaagacatttacaaatattattgtgtatgttgccggtgaaaatttctgcatatatttatctaaaaagttatcggttaatactttgcgtttatagaacatatatgtctttttatcattatcttctgaaataagtctagccaaaaatatattcggcatatgctttatcaaatcttttgtgtgtcttataacattgaatttaattctaattggcgaaacttcatttaattgttcttctgaaaattccgattctgtaaaataataaaattcaaaactttgtggttcgaaagaaataaaatttgctatttcatctttgtgttcaagcactttcgctttgtcaaaacgtatttcttgggtagacttgatatgttgtttaaaaatgactacttgtttttttcttttatgggctaaccaaatttcttggtcatctttttccctactgacaatatcaaaattcaagtacctaatccaataatatattgttttccaaaattgtttgtctatgttcatttagtcctccactatgctgcttgatatataatcaatttatcgactggttgatcgaatgattccggttcaaatgatgttatttgaaaatcgtataataagcttattgtctttgtctgataattagctaaaaacctgtcgtaatagccaccaccatacccaattctatatccatcgtcttgaaatccaacaccaggaacaacaattaaatctaggttattcgttgtttcaccttttgaagttggatagtaaatccccttattatcgacatcaatatctttgagattaaatatctctttaaaagtcatttgatgatttaaataatccattttcggtacaaaaatacgtttatgatccattaaggcttgttcaataatagaaaaagtatctacttcatgattaaaagaaagaactagcgcaattgcgtttgcttctttgtattcttcagttgcaaaaaattgatttcttaaccatgtgtctgcttttcgcttttcagctttattaaaattcttcattttatgtaaaatgtattttctaatctcatttttagtcacattatcacccactttattcaattctattatatcgttaataacaatacatgtcattatgttgtcatgatgaattatgcgacaattctaaaatttattatttcaattgaaaatcttttatcatttcatacgtgtgcataattaaaaaggtgaaacctcttattttgagatttcaccttttttattgttaatttaaatttaattttaatgattattttgtttcacggtgtaaagtttgtttgttttcacgtgaacagaatttcttcatttcaacacgttctggattatttcttttgttcttagttgtaatgtagtttctgtcaccacattccgtacaagctaaagttacgtttacgcgcatggttattcctccttatcatttctaaatacgactttattattataccaacatctataatatttgcaaagttaaaattttacaaccatgcgctacacaatcgtcaggttaaattttatttgtctttgtctttatttttatcatctttacctaactgcttaaagtagtagttaattacatctctacctaagtctccacctgttaaccatggtggtggtacaggctgatttgtatatacaattgaaaacgctaattttggatcatcaattggcgcgtatcctatataagtagagttaactcttggctctccgttttggaacacttctgcggtacccgttttaccagcagtaggtactactgtatctttaaaactaacatatccagtaccatctttatcattaaatgccattttgaatccttcttgaatttgtttgatttccttttcagtattattaaccttgttcaagacagtgccattaattttcttcttgagtggaccaacctcatctttattagttgattcatgaatcgttaatccaatgtgtggctgtattctataaccatcattcgctatagttgaaacatattgtgataattgtaatggtgtataggtatcatattgaccaattgataaatctagataattacctggattatttgttaatggttcgatttgacctcttgtttcatttggtaaatctatccctgttttcacacctaagcctacttgatttaatcctcttcttagcttttgggcaggtgaacttatgtctgaaggtaaagccataccagaataataagggtctcccgctaattttaatgctgttttaaacatatatacgtttgatgaatgcatcaaagcttgcttatcattaatagttacatgcccgtttttattgaagtatgatcgttttgtcaaaccaccttggaaatgtaatggttcatcgaccattgtttctccaactttgatagctttattctgataaccggctaataatgttccaccttttacagaagatccaaccgcaaattgagaagtaaacgtaccaatgtcataatcagtcattttaccactcttattaatctgctttccggcaagcgcaagaatgtctccatttttaggattttgtacaaccatcattgcattatccatatctttggcaccttgactgcgaagcttcttaatttgtttatctaataatgcttctacttctttttgaagatctatatcgatcgttaatttcaaatcttgaccgcgagcgccaggatttaacacttctgaagatgtaactttaccagatttgtccgttgtgtatttcatttctttcttcttaccacgcaatacatcttcatattgatattctaggtaagattttccaacacgatcattgcgtgaatatcctttggataagtaatgttctgtcaattcttttggaataccttcagcaggtgtcgatacatctccgaatatacctcttaaagtatcgccatatggatattttctatcccaatccatagacgtgttaacacctggtaatttggaaagttgctgagaaactgctgcatactctttttcactgacatcttcattttttatcatttgtggatctaaaactgttcctgcattcatctctcgaaaaatagctaaaacttgtaaatctttagaagacaattcatctaattgtgattttccgattttcgataacagttgtttatcatattgatcttgtttaatacttccatctgctaacatagcttgttcttttgtcatcattgcttttgcttttttaggatgcaactgaatccagaaatctttcttatcacgttctgtaattttcttagtatccatcttgattagctttgataacttttcagccgtatccaacatttccgattgtgttgtttttcgacccctagtatatgtaatagccattttagaagcattatcaactaaaactttcccatttctgtctaaaatacgacctcttggcacagactcattcactgtaatgttttcatcattttttataatttgtttataatgtgagccttgtgcgatttgtaaataacctaaacgtagtactagtactgcaaaaataaatacaatcacaccaaatataaagttaattctcttgttaattgtattttgaacgatttcatcatttgatttttcttttagtctttttaacaaaactacctacctctattcaaagtctttcactttaaatcatatatgaatttagaaattatttctatctttttgacaaaaaaataacggtctcatttaagagaccgaacaagtaatcatactttattttgttgcattatataattcgtcaactttttcccagttaactacattccaaaatgcgccaatgtagtcagggcgtttgttttgatattttaggtaataagcgtgttcccatacgtctaaacctaaaataggtgttttaccctcagttaatggattatcttggtttggtgtagtcacaatttctaactggccattgtttacgactaaccaagcccaacctgaaccaaagcgtgcagctgctttgtcagcaaattcttttttaaattcttctaaagaaccccattgttctttaattttttctactacagtacctttttcttctgagtttggtgaaagtaactcccagaataatgaatggtttaaatgtccaccgccattattacgtacagcagtttggatgttagctggtacactgtctaaattagcaacaatttcttcaatagatttagattctaaatctgtaccttctactgcagcatttaatttcgtaacatacgtgttatgatgtctgtcatggtgaatttccatagtttctttgtcaaaatgtggttctaatgcatcaaatgcgtatggtaattttggtaattcaaaagccataaataatcatcctcctaaaatgtctgtaagtaaataataacaagcagtgactggttcaacaaagaatttgcttaaattctactacttattattttctctactcatttaatataactcaaatcaaaaataattaaacattttgtatataaaaagttaacagatttgccataaaatcatacgaacggagtatgaaatgaacctttatcttctataatttaaaaaatgagatttatgcatacatctgaccaaatgtgcataaatctcatttctttatattaatcttggcaagactcacatacaccataaacttcaagtttgtgtttgtgaatattaacaccaggtagtgataattttatctgatctattggacaataatctattacctttgtatctccacacttttcacagataaaatgatgatgatgatggtttgtacaagcgattctaaacttcatttcaccatcaagttctgtattttcaataattcctaaatctttaaataagtgcaggtttctatatattgtgtcgaatgaaattccaggataattttcatccataacttgttgtatatactttgcgtttatatacttatcttcttcgacaaaaatatctaacatatctttacgtttatctgtatattttaaaccgttctcttttaaaattttaatagcatcatttgtattcattgatattagctccctttttaaacttcattcgcattttctgataagccattgtaatcataagtaaaataacaagtagaactacaattacaccacccggagaaatgtccatatagaaagctaggactaagcctaatattactgataattcacctaaaaatacacttagtaatatcaattgcttaaaactttttgttattcgcatacttattgcaattggtaacgtgattaacgcacttactaacagtatccctacaacacgcattgaggcagaaataaccatcgctacaataacaataaataaaaattgaatccatttaggaatgccaatgactttactatattcctcatcaaatgacaatataaataattctttataaaacaatgtaataaacagaacaactatgatggcaatgacaataatcgttgttaaatcacttatattcactgcgcttattgagccaaatagcaatccaacaatttcttgattgaacccatcagctaatgaaatgaagattgcactcaaggcgataccagcactcattataattggaatagcaatttcttggtaagcagtgtatgacgttcttaatttttcaattagaagcgcacctactattgcgaataagattccaaaccacattggattaataaatactagtgttggcataatagtaagtaaaaacataccgaaagatataccacctaaagttacatgacttagagcatcagctataagtgatagtcgtctaacaacgataaaagcaccgattagaggcgcaataaaacctatcaagataccactaattaaagagtacctcataaaatcaaaattcaataatgcatctatcaattgtgacacgcctttccattttaaataaactcaaatctttattaattacaacattctcgattatgctgatgatcgacaaaacgtacaggatgtccataaatttttgaaatttcaacttcatcaagtgatttaaactcatcagttgtaccatggaaatgcaaatgcttatttaaacatgctacttcagtagcagtatctgctacaacaccgatatcatgagtaactaagataatggtgataccttcttgttttaattgatctaaagtattataaaattcacttacatgttttgcatcaataccattcgttggttcatcaagtactaatactgcaggttctgaaatcaatgctcgagcaatcattacacgttgttgttgaccacctgataattctgctatatttttatgaattaaatcacttatattcagtctttctagtactttaatcactttttcattatctttgctattaaatgtttggaaaagacgttttgtctttgttaatccgcttaaaacaacttctttaacacttgctgggaaacctgaattaaaggcatttgctttttgtgatacatagcttaatttaattgatgttttcttatttttaaaatcaataccttcaacaaaaatctcaccactttgtaaaggtaataaccctagaatcaacttcaataatgttgatttaccagcaccatttggtccaacaattgctaaaaattcacctttatttattttaatgtttatattttctaacacttttttatgatcatagtagtaattgacatttttcaattcaaagactggtgtcatcgtattctcacctcgcattcaactatacaactcctagtaacatatgtaaacagtaatgtttacgactcaaaattagacaaaataaagagatatgcccccttcaagttttatttatcgcatttcttgaagagagcattatcattttattgttgcataaccttattttttaattctgggtcaaattgctgttgttttaacatttcaatttcaagtttatatggcggttttttatttttcttatcttcaccaacataaggtgtttctaagattttcggaatatctttaaaactatcatgatgcacaatgtaatttaatgcatcaaaaccaatgtaaccgaagccaatattttcatgtcggtctttttgagcgccacggtcatttttagaatcattgacatgaacaactttgattctgtcgactccaatgattttatcaaattcatttaatacgccatcaaagtcctctttaacattatatccagcatcatgcgtatgacatgtatcaaaacatactgataaacgttcgttattatgaactccatcaataatacgtgctaactcttcaaatgagcgaccaatctctgtacctttacctgccatcgtttcaagcgcaatacgtacattattgtcattcgttaaaacttcatttaatccttcaataatcttattaattccggcatcaacaccagctccaacatgcgcacctggatgtaatacaatatctttagcccctatagcttgcgttctttcaatttcttgttgcaagaaatctacaccaagattaaacgtttctggtttggttgtatttgcaatattaatgatgtatggtgcatgaacaacaatattagataaaccatatttttccatcacttcatgacctttagttatatttaaatcttcaatacttttacggcgcgtgttttgaggtgcaccagtataaatcataaatgttgtttcaccatattcatgcgcttctatagcagaaccttctaacatctttttaccactcattgaaacatgtgatcctaataacataaaacacacctaaccttttttgttttgcttacgtttttgtctattttgctgcttactaaattgcttacgctcttgacgtttcattttttcaacttcttgtttaaatttcttcttataacctggtttaactttgtttttaattttacttcgaactttgttcttcacttgattagttaaatggtcatctttgcgcattcttgcttgacgctgattgtgcgctttaacttcttttaactcaccatctttaatatcaacagtattgaatacaaaaccgcgatcttctattaatgaaatattgtgttcttcatcaggactataaagcgtaattgctacacctttataattcccacgaccagttcgtccgactctatgcgtaaagaagtcaatatcatttggcacatcaaaattgatgacatgactaacaccttcaatatcaataccacgagatgctaaatcgctggcaataacgtattggaattctaaattacgtatacgtttcatttgttgtttacgttcacgtggcgttaagccaccatgaatcataccaactttaataccagcttcatttagtgaacgtgctaaatcatttgcattatctctactattacagaaaataatacataagtatggatttagtatatcaattaaatttaaagtcttttcaactttagctgcacctttagtaggtattaaatagaattcgatgttctttttattttgttttttactgtcgacagctacatattctggatgacttaaatatttatttaaaaatggttgtaactgttgtgggattgtagcactaaacaccgcaatatttgcattatcttccaatcttgcagcaatgtaatctacatcttcaattaatcctaagtcaatcataagatccgcttcatcaataactaaatatgatgctaagtgcacatgtaaatgtcccgttttagctaagtcattaattctagtaggggtgcctataatcaattgtggttgtgcattacaacgttgtctatctttctctatatctgtaccaccaataaaaactttaactgaaacaccagcattaaattggcttaaatggttcgctgcatcgtatagttgttgtgcaagttctcttgttggtgcaactacgattgcttgtggttcttttatttcactatcaattaactgcattaatggtaataaaaatgcatgagatttccctgtacccgtttgagattgaccaattaaatttgttctctttagtattcttggaataattcgattctgaatttcagttggtttttcaaaattaaggtctttcacagcgtcaattaaactagattctagattaaattgttcgaatggatgttttgccatgatttggcctccttatatgttcatctttactattataaagtataaatgtgctattttaaataaaaatattaaaacctcgaaatttcaaaatttagaaatcccgagattttagtttaaatatattgaaatggatctgtattaattgtagatgcttcaacatctaaatttattttttctgtattgaaccaattcattagtaacgcttttaaaccttctttcatcacatattcgctgtaatgattaatatcaattaaattcacaccatgaattttagcatctaaggcatcatgatgtttaatatcacctgtaacaaagacatctgcgccttgttggacagcttgatattcatatccaatacctgaaccaccaataattgcaatacgtttaattttctgattagactcaccaacaaaacggacacttgggatatttaatttagatttaatatcagctgcgaaatcttccaatgtcatttgattatccacttctgccataacgccaagtccataaagggatgtttgttttatctcaataaaatcaaataccggtgtttcatatggatggtattgtttaattaattgctcagcccttgacttttgatatgcatctatcataaattcaattttaacttcatctacatattcaattttatcaatttgtcctattgttggattagcttcaccaactggtttgaattgccctcttccttcactttcaaagaaacaatattcataattaccttcttgcgctaatccattttcactaagcttatctttaaatggtccaacattatccttaggtatatatgtttgaactttatagtatacatcttgttgattatttattattgaaatgttcttcaaacccatcgccttcgccaacatcatattgacaccatacggatttacatctaaatttgtatgcatcgctattaaattaatgtcatgttgaattagttttctaatgatcaaaccataaccattagcttttaatgatgttacgcctttaaagattagaggatgatgactaataatagtattataacctttttcgattgcttcatttactacttccaacgtacagtctaatgctgttaaaacaccagtaacttcaacatcttcatcacctattaacaatcctacattatcccaagattcagcagtactaaatggcacatgatgatctaacaatgtcattaaatcagctattttcattactataacaccctttcaattacagcaatttcgtcattaatttgagctaaacgttgatgatgttgttcagtattgagtttcgatttaatatgataaagtgcttctaactctctttgccatttttttataaaatattcatttttgttgttcagcaattttggtccgaatttcaattcatcagatgatagctctattaattctgtagaatattctgctacaacaatttcataaatatggcctttttcttccattattatttcatcaattatttcataattcaattgttgtaatgtttgtcttaaattttcagtttggatattactttgtaaaatcaaccttggatgttgacttaacttatcttgcccatcttttaaaattttagcaataagtggtccgcccataccacaaattgtgatattatcgattacgtcctcaggttgaataacacttaagccatcccctaaacgtacatcaattctatctactaattggtttgcagctacatttttcacagcagcttgaaaagggccttgaataacttctccagcaataccgcattcgcataaatggttttgaattgcatagattggcaaataagcatgatctgagccaatatccgcgattgtaccttgttttaaaaatcgacttaccgtcgttaatcggttatttaacgaaatcattttattctcctttatgaaaaaagaggttgaacattattcaatgtaccaacctcactcaagttaaatcttaatctaaaaataaataagcgcttattcatgtcttggtatcaatcattaaaattgatataaattaatccataaagtctttcaaacgtttactacgacttggatgtcttaattttctaagtgcttttgcttcaatttgtcgaatacgttcacgtgtaacaccgaaaactttaccaacttcttcaagtgttcttgttctgccgtcatcaagaccaaatcttaatcgtaatacattttcttctctatcagttaatgtatcaagcacatcttctaattgctcttttaataattcataagcagcatgatctgaaggactttgtgcttcctgatcctcaataaagtctcctaaatgactatcatcttcttcaccaattggtgtttctaatgaaacaggttcttgcgcaatttttaaaatttcacgaactttttctgctggtaaatccatttcttcaccaatttcttctggtgctggatctcgacctaagtcctgtaataattgacgttgaacacgaattaatttattaattgtttctaccatatgcacagggatacgaatcgtacgtgcttggtcagcaattgcacgagtgattgcttgtctaatccaccatgttgcatatgttgaaaacttaaatcctttgttaaagtcaaatttttcaacagctttaataagacccatattaccttcttggattaaatcaaggaataacataccacgacctacgtatcttttagcaatacttacaactaaacgtaagttcgcttctgcaagtcttgattttgctacttcatcaccttgttcaatacgtttggctaattcgatttcttcttgtgcacttaataagttaacacgcccaatttctttaaggtacatacgaactgggtcatttattttaacacctggaggggcactaagatcacttggattcagtttctcgtcagtatctgaactatctttttcattaactagtgaaatatcattatcatttaattgatcaaagaaatcatccatttgatcagagtcgatatcaaaattctgaagtttttcagcaatttcttcatgacttaaatgaccctcttttttacctttttcaattaattgcttcttaacatcttctaatgttaatgtcggatcaattgtttgttttttaattttaactgtgttatcagacatgaaacggcctcccgattttaaatatgaacattcgaaatttattcaatattgctattttaaactaaattcttaattaattcatccatatttttaattttattttacaaattggaactaatcccaatatttatttttcaatagtgttgtttaaatgcggtaactatcatttacccttatacattttgacataatcattattcgtattattctttaaaatcacatgctacatgcgttctttattcttagcaacaatttgctgtaaatagtatttttgtaattctacatcgccaatccttgtagcttcccttaatttatgattcaatgactcaattgtttcttgtcctttttcattaataacattgacataatcatcaatttcattttcatatggttcgtcattcaaattatattgttctaagctaattagtgtttctctcaactcatttgaattaacatactgcacagcatcactgatattatattgatcattttccgcataaaaatcatgtaagacttcgaatacatatttaaaatgctgatttgtgaagttatccttatcaacactttcataataatttaaaaatgtatctttatctctcattaaatgttttaaaaatgctcgctccgctttttcttgacggctcaaattgtcaaattgtgccataccaattggctcaggttcaatgtaaccgccatactcatcttctggataataattggctggtgcttgattgaattgtatttcgttagctaattgctcaggactaacattgaaaaatggtgcaacatcatttaaagccttttgttgcaaaatcgatgatttcataagcgaaatatcatgacttagttctttcaaataacgttcatatgaaaggtcattatgtgcaatttcatcttttaatatactcactttataatgtgcaaatgactttttgtcattttttacaaaagcagtaaatgcatcgttgccatacttaccaatgtattcatccggatccatgcctgatggcaattgtataacaaatacatttagcccttgctgtaacaaattttgacctgttttaagtgttgcttcactacccgcaaaatccccatcaaacattaatgttatatttgatgttaactttcgtataaaagtaatatgttcatctgacaactgtgtacccattgttgcaacaacgtttttcaagccagcagtatcagattttataacatccataaaaccttctagtaatacgatttcatctaattttctaattgatttacgcgctttatctaagttgtataacaactttcttttttgaaagataggtgtttcaggactatttaagtattttggttcttgaccggtatatgttcgacctgaatatccaacaattcttccttgcgcatttttcaaaggaaacataatacgatttcgaaatctatcgtaataactgaaattttcttcgttacgtgataataatccggcttcatatgctaattcaatatcgtaaccctttttttgaagaaaatcatgacaaaaatgtgagctatcgggtgcaaagccaatgcctcgctctttaataagcgcatctgtaaaaccacgttcttgtaagtacgttaatgcttgttcgccttcgactgtctttgttaaagcgtaataataaaattcttgtattaactcatgcatttcaatcatttgtaaatcatcagaagcaatttgaacatttgagttagattgtgttgcctcaatatctacagcaacattaactctatcacctaattctttaaccgcttcaacaaatgatatgtctttaatttcttgagtaaattgaaaaacattgccaccttttttacaaccaaaacaatgacaaatttgtttatcttcagaaactgtaaatgaaggtgtcttttcatcatgaaaaggacacaaacctatataattgcgtcctctcttttctaattttacatattcacttaccaagtctaaaatgtcggttttatcttttatttcattaatgatcgattgatctattcgcaaattaaatcacctattaagcattagttatactattatacctaattttcgacaaaaatgaaatcatttcgatttattttgttcaatataatggattatatcgtttgctgtttcttcgattgctttttgagaaacatcaatgacaggacatccaatttcacttacgatttcttcaaagtaattcaattcttcttgaattcgtgcttctgttgcatatcgagctgtgtcacctagtcctaattgttttagtcgctcttttctaatgcgatttaatttttcttcacttattttaagtgcgatacatttctttggattaatatcatataagccatctggcggtgtcacttctggtacaatcggtacattcataactttgtaactcttatgcgctaaatactgagataatggtgtctttgaagttctcgaaataccaagtaaaacaatatcagctttaggtaatcctttaggatctttaccatcatcatatttaactgcaaactctatcgcatcaattttcttgaaatatgcatcatctaatctatgaacgatacctggctcattataaggtttttcttcaaccgaagcagataataaatccattaatggccccatgatatcgacagacttcaattggaattctgctactttctcactcatatattgcttcatttcaggtttaataagtgtataaacaatgatagcatttgtatcttttgcaacttgaatcacttcatcaacatcttcaaaagattcaatatatggatatcttaataattcatttttacattgcttaggattgaattgtgaaatacctgccctagcaactaactctgccgtttcacctatagaatctgaagctacgataattttaattttttccattacttctcacctattctttatataatgctactaataacttagctattgttgttttggaaattcttccaattacttcatacttttgattatctttttttcttacaattggaatcgaatcaatttctttttcaatcattctatctgctgcgtatatgactaattcgctttcctctaaataagtgacattaggcatacgtgtcatatttacactgataggtactttatgaatatctgctccaatcattgaagctcttaataaatcttttcttgaacacacaccaacaaaatcgttatcttcattaataataaataatgtacttacatcttctaaaaaaattgtacaaatagcgtcataaactgttgtattctctcttagcacaacaggttgagacatatagtccttaacctcaaattgtcgaagtttttcattaaaaaatttgccttttgatttacctgaataataatatccaactcggggacgcgcttctaaaaaacctgacattgttaatatcgctaaatctggtctaagcgttgctcttgttaaattcaacttatctgctatttgttcaccagtaatgggtcctttagttttaacaatttcgatgattcgttcttgtctttgactgagttctataggtcttcaccccttttttattcacctattattataccgatatttctttcatgtcacaaacacattaattttacttgcctttaaataatctatcaattagaataaacgtacagcgagttaaggatagtgtaagcttaacaataagattggcgcaacgaatcattttaaaataaaagcgagtgactacactaatttgggtggaaccgcgggttaaatacgtaacttattttgtattatatacaatttaaaatattaactcgtcccatggaagtaaagcatatttactatgctgttattttccatggggcgttttcatgtatgaggagaggtaattatggcaaaagatatggatacaattgtttcattagcaaaacacagaggttttgtgttccctggtagtgatatttacggtggtttatcaaacacatgggattatggtcctttaggtgttgaattaaagaataatgttaaaaaagcttggtggcaaaaattcattacacaatcaccgtttaacgttggtatcgatgctgcaatcttaatgaatccaaaagtatgggaagcttcaggacacttaaacaacttcaacgacccaatgattgataataaagatagtaaaattcgatatcgcgctgataaattaattgaagattatatgcaagatgttaaaggtgatgaaaacttcattgccgatggtttaagttttgaacaaatgaaaaaaattattgacgatgaaggtattgtttgtcctgtaagtaaaactgctaactggactgaaattcgccaattcaatttaatgtttaaaacattccaaggtgtaactgaagattctacaaatgaaattttcttacgtcctgaaacagcacaaggtatttttgtaaactataaaaacgtgcaacgttcaatgcgtaaaaaattaccatttggtatcggtcaaattggtaaatcattccgtaatgaaatcactccaggtaacttcattttcagaacaagagaatttgaacaaatggaacttgaattcttctgtaaacctggagaagaaatcgaatggcaaaattattggaaaacttttgcaagtgactggttaacaagcttaaatatgagcagtgaaaatatgcgtttacgtgatcatgatgaagatgaattatctcattactcaaatgcaacaactgatattgaatataaattcccatttggttggggtgagttatggggtatcgcaagtcgtacagacttcgacttacgtaaacatgctgaacactctggtgaagatttcagataccatgatccagaaacgaacgaaaaatatattccatattgtatcgagccatcacttggtgcagatcgtgtaacattagctttcttatgtgatgcatatgatgaagaaggcgttgaaggtagtaaagatgcacgtacagttttacacttccatcctgcattagcaccatataaagcagcgattttacctttaagtaagaaattatctggcgaagcgattaagatttttgagcaattaagttctaaattctcaatcgatttcgatgaatcacaatctatcggtaaaagataccgtcgtcaagatgaaatcggtacaccttattgtgtaacattcgactttgattcattagaagataatcaagttacagtacgtgacagagattcaatggaacaagttcgtatgccaatctcagagttagaagctttcttaactgaaaaaacaaaattctaattaaaaagactttccaccatatgtggtggctatataatttataaaaagagatactggttagtaaaattgccagtatctcttttctattcaaaaaggtattcaaataaacacatctatgtggctacttgaataccttttattattttatgttattgttccaatctttttaattggttgattagtttctgacttttaaaaaacatacctgcatattcacgatataacattaaaatgatatctgacatttcatcaataatttcttgatggatattcaatgaattcattttatctatcggtaatttttgtaatacatctaataaatatagtgttttattcgataatataactgcatgtacatctttagaagcctcttgccttgaaatcgcaccgtcaaacttaaaactataacctattaaatctgcttgtgtgtcattaccactcacagcacagcgattaaatgatgcagtaaaaccaaatcgtttcatgcactttaacataactacgactgacattaactgtgcagatgtacctgattctattttttcaagaacaaattgtaataattgatagttatatggtgcaatgtcaccttcatccattgagcgctcaatagtttcagctgccagagcggcataactgcttacgtaaaggtccatttgtaatttataatgttgactaataacatctacagaatttaacgttcccatacctcgccactgattgtaaataaacaaaccataaacaaacaattgcgtttgcgcttgtaaacccgtcttaacttttttagcacgccttgccataagtggtacttttgcaccatgctcatttaaaatcgtgataattttatcagattcaccataatcaactgctttgatgataatccctttttggcgcattaacaattatcttcaccacttttaagattaatcttggtcttcaacataaccaatttggcgaataaagttaactttgtttcgccagtctctttgaactttgacccataattctaagtaaactttagagcctagaagcatttctatatcacgtctcgcacgttttcctacttcttttaactttttaccgccttttccaatgacaattcctttttgcgaatctctttcaacatatatagttgcttcgatatgaacacgatcttcgctttctttaaccatacggtccacattaacaccaatcgcatgagggatttcttcacttgtaagatgaaggattttttcacgaatgatttcacccactacaaattgttcaggatggtctgaaatttgatcatctggataatatttaggtccttcgggtaaatacgtctttaaaacatcaataaaatgatcgacatttagcccttctaatgctgaaataggtacaatctctgtaaagtccatataactttgatattcttcaatctttggcattaattcatctggatgcactaaatctattttatttaatactaaaaatactggtgtcttaacatttttcaacatttctataatatattcatcgcctcgtccaatttcctcattggcattaaccataaacatgattgcatctatctcagataatgtatttttagcgactttcatcatatagtcacctaatttgtgtttaggtttatgaatacctggcgtatcaatgaatataatttgcgcgtcatctcttgtcataacaccttgaattttatttctagttgtttgagctttatcggacatgattgctattttatggccgatcactctattaacaaatgttgactttcctacatttggtctacctataattgaaacaaatcctgatttatgttctgtcatttattctaaatcctttcctgaaaatccaaatggtagtaactctgcgactgtcatcataaccatatctcctttatgatttgtcatatacacaggcatatcatcatcacataattccttcaaaacttgacgacatgcaccacaaggtgatgacggtttatctgcatctacggttacagttattgattcaaaatcacctggtctgtatccttgagaaattgccgataccaaactagctcgttcagcacatatcgataatggataagaagcattttctacattggtaccataaaaagttctaccgtctttcgtttttaaataagcccctactttaaattgactgtatggcgaatatgattcttgttgtgcttttctaacttcttgaaaataatgaggttgataactcatatatgcctccctaaaataacgctataaaatgtggtaaaaatactattaaacctataataaatgctaatattgaaactataagtacactaaaagccgcaatatctttagcgtatttagctaaatcatgatattcaacggtcactaaatcgacaacatattcaatagcagtgtttaaagcttcaacagtgagaactaatgcaatagcaatgagtataaatatccactcaatccgattaatatttagtacgagaccaaagacaatagcaacaatcattgcaaacacatgtaaaagaaatttatagtctttttgaattaagattttcagcccatcaagtgcatatttaaaccttttcataattagtctcgtgttaatccatatgcgtttaatattgtatcttgtcgaccaaacatttccttttcatccgcttcagtcatatgatcataacctaatagatgcaaaaatccatgtaatgctaaaaatcctaattctcgttcaaaagaatgtccgtaattgtttgcttgttcttgcgctacatccgtacagataattatatcccctaaaacacgtggtatatcaagaccactaaaatcaatctctggctcatcttcttctaaagcaaatgagattacatctgtaactttatctttatctctatatgttcgattaatttcttgtatttcttgtttatctacaaatgtaacagaaagctcagcatcgtcttctatatgctcttcttttttagcaaattctaataaatcttcaatttgtttataccaagcatctttaactaagcctgtgtgatcgctaaaatctatcgtaaacatttaattctctccttcataatgttcaatgatcttacttaccaatggatgtctgactacatcgctctgatctaatttcaatatacttatacctttaacgttgtgtaacctactgaccgcttccttaagtccacttttaacacctttaggtaaatcgatttgagtttggtcaccagtaactaccatttttgagccaaaacctagtcttgttaaaaacattttcatttgcgcatgtgtcgtattctgcgcctcatcaagaattacaaatgcatcttctaatgttcgtccgcgcatatatgcaagtggcgctatttcgataatgcctctttcaataaatcgctctgtttgttcacgcccaagaacagtatatagaccatcatataaaggtcttaaatatggatctaccttttctttcaaatctcctggtaaaaatccaagtgactctcctgcttcaacagcaggtcttgttaatacaatacgtttaacagcaactttacggagttgctttgctgcataaactacagctaagaatgtcttacctgtaccagcaggacctataccaaatactaaatcattatttttcatggcattaacatatatacgttgccccatcgttttcgcacgaatcgtcttaccaaatgcatctttagttatctcttcatcatataaatctaacagatgttgaattgtgttattatgcgccattttaatagctgcttcaacatctttaattgtaatattattacctaaatcaataaccttcagcaaattgattaatactgattccgctttttctacgttttctatttttgtacctttaacggcaacttcttgtcctcttgcatggatgacaacatcgaaactctcttcaattgcttttaaatgttcatcattatttccaattaaagcttgagattggttcatatcgtctatttgtataattccaggcatacacgcgctccttttcatatatcatttatattcattctatgatgctttaatatctacttaattatatcatgcaattgattgatttaaacatctttgcattgacttactcatttttctttaatttaaaataatcatttatacttttcaccttgtcataaaagcagattcaattttagactaatcaattttttgctgtaatttaaataactaatatttctcgaaaaattctctttgttttttaatttttcttaacgtaaaaaaacaagcaactaccattacgatagtgcttgttttcaaaaaattttataattgttttggtttagctaaaatttctgaccatatcataccattgattacttcatctttatcaaattggaacgctgatttagtcaaatctttttcgacattttgagaattaagcagctgctttaatttcaaacgttttgtacgttcagataagtatttatcctcaataatatctctagcacgtttttccattttagcaatttgcttttctttttctctatcaatgtcagtacgaatcgttttaatatcatctctaagtgatttttctaattgacgtctaatttcgtcagaattatcttgtctagaaggtctatgtttctgctccaccggttctgctttaggcactgtgattggtttctctgtcatcggttttgtttcttgttgttttttaggtgccataggttctacaacaggtttcgatttaggctcttcctttggaagttcatcgaataaaggtggtaacgtatcatcatattttcgtttcgatgatttcttttcttcttcatttaattcttcacttatttctttaaacgttcgctcaatttcttcaaaaaagccacctttttttggttcattatcggtagatgttttttgaggtggcttttgattttgtctatctttatgactattttcgcgcatagtagtaatgatagaaatgatcactgatatgacaaaaattagaataccgacactcatttaatcacctctcgacttaatgttcaggtgactcatcatcactttgatcagttcgtttattaattgcatttctcatgcctgtatcagcttcgatatttttcaaattataataatctttaacactgatattacctgaacgtaatgcttcagccatagctaatggtacttcagattcggcttcaactactttagcatgcatttcttgtacacgcgctttcatttcttgctcagttgctacagccatagctctacgttcttcagcttttgcttgtgcaatatttttgtctgctaatgcttgttcagtttgtaagtctgcaccaatatttttactaatatcaacgtcagcaatatcaattgataaaatttcaaatgcagtacctgaatctaaacctttgcttaaaactgttttagaaatattatctgggttttcaagtacttctgtatgatgcttactagaaccaattgttgaaacgataccttcaccaacacgtgcgatgattgtttcttcaccagcaccaccaacaagtcgagcaatattagctctaactgtgatacgagctttggctttcacttcaataccgttcattgctacacctgcgataaatggtgtttcaatgactttaggattaacagacatttgaaccgcttctaatacgtcacgtcctgcaaggtcaattgcagcagcacgttcgaaaggaagatcaatgtcagcacgttgtgcagcaatattagcgtcaacaactctgtcaacatttcctcctgctagataatgcgattctaattggtttgttgttaatgctagtcctgctttgtgcgctttaattaatggcgctataacttttcttggagatacacgacgtaaacgcataccaaccaatgtacctataccaacatgaacgccagctgctaacgctgaaatccataaaccaatgggtacaaatgagaataaaataagtaatgcaactactataataactgctattacgataaaacttaaactaaacatggtatcgctccttttaattaatctacttccctcacaactactcttgttccttcaacttcaaggatttttaccgttttattgcgcaaaataaagttgccatctgaaacagcatcaatacgttcattttcacaaaaaataatccctgcaggtcgaagatctgtaactgtttgagcagtctttcctacgaggtgcgagcggttatcatgagaattgtaacctgactcagaattagttgaatcttttaagataactttatccaaaaacggaatctttctgttgaaaatcttcactaatatcacccattctacaatcgttaaaatcaaggcaacgataacattcgcaagcataaatagcaaattatcaccgagcgttgttatgcttatagttatcagtatcatgccaataataccaattactgcaccaactacaaataattcaattacaactaatataacgccaattgagaatattaagatagaatgcatattgacatttccttggattagaaatcccaaaaataaaataagtaatgataatgtggcgataataccagctgcattgatttttttagagtaaagttgatatacaaatcctaagaatgtcaaacaggttaatattaacgtaaaaataggttgaacaattatattgctaacttgttcaacccaagtatctccagccgttgattccaagatagttgtcatttgtaaaaaattattataactcacaatttcacctcgccctcacattaattatacatgaaattgaatatactttatagttataagaacctatagaatatcaatttgattatttataaactatataactttttttaattaaaaattgacaacaaaaaaacatcacatattagtgtcagacactaacttgtgatgtttgttttatataattaatattcgtgttgagggagtcaacagaggtattaattatttgaatttacgtttacgtgcagcttctgatttctttttacgttttacgcttggtttttcgtaaaattcacgtttacgtacttcttggattgttccacttttagaaactgaacgtttaaatctacgtaacgcatcttcaagtgattcatttttacgtactactgttttagacatctgtatttccctccctccaaatatcaacggaactttatagtcaattgcacagtaaaactatgcatttataagtataatatatctgtaatttatggtcaattagtaaattgttttttatttgaaacatatttcacatcaaaatcacaaagacttttagattttgttctaaaaatctcttaataatttatttaatgagaagagttgcttatatagtaaattgtgaagccgttaaaacaacgttacaaaacctatatttttaatacggaaccatatggtatgaatcaaggaatacttaaactaaaacttctctatcagatttatttgtggcgaaatcaacaactttaattgcttgcccttcatttaatggataatttgcttgcgtaattttaacttttacaatttgacctatgagtgattcgtcaccttcaaattgtactttcatataattatctgcatatccaactaatgtaccttctgtgtcaccctgttcctcaggaattacttcaagcacatcttgatcaaatttagacgcatataactttccgagttgattgcttagcgtaattaacttatgcacccgttcatttttaatttcttcatcaatttggtcatccattcttgcagctggcgtgccaattctaggagaataagggaaaacatgcagttcagagaacttatgctttacgataaaatcatatgtttcttggaactcagcttcagtttcacctgggaaaccaacaattacatcactcgtaactgccaagtctggtaaagctttatgcaattttgttaatcgttctgaaaatctatccattgtatacttacgtctcatacgttttaatactgtatctgaaccagattgtaatggaatatgcaaatgacgcacaacttttgttgaacgttctaaaacgtcaattacttcatctgtaagttgacttgcttcaattgaagaaattcgaattcgttctaatccattaatcgtttcaagatcacgtaataattgggccaagttataatcttttaaatcttgaccatatccacctgtatgaattcccgtcaatacaatttccttatatcctgaattcactagttgcgtcgcttgttcaactactttttccggatctcttgaacgcattaagccacgagcccatggaataatacagaatgtgcagaagttgttacaaccttcttgaatttttaatgacgcacgtgttctatctgtaaaataagggacatctaattcttcatatttacgatttttcatgatatttccaacaccattaattggttggcgttctttacggaattcgtcaatgtaacctaatagtttatgtctatcttgtgtaccaactactacatcgacaccaggaatttccataatttcagctgatgaagtttgcgcataacaacctgttacacagattacagcatcaggattttgtcttattgcacgtctaattatttgacgactttttttatcacccgtattcgttactgtacaagtattaataacaaatacatcagcattcgcttcaaagtcaacgcgctcatagtttgcttctttaaataattgccagattgcttcagtttcataatggtttactttacaacctaatgtgtgaaacgcaactgttgacataaatattcaccccattaattctttttcataacttattgcacttaacgcatacaatggcgcagtttctgcccgtaaaattctcggcccaagaccaacaactgtactagtattactaaataatgaaatttcattttctgacaaaccaccctcaggaccaaaaatcatcaacactttatcctgagcattgaattgttgtaaagtttgcttgaaattgcttaactcaccatcttttgcttcctcttcatatgcaataagaatatagtcataattatcaatagtatcacaaattaattttaaattcgactcgaattgaatagatggaatcactaaacgatagctttgttcagcagcttctttaattattttttgccaacgctctatctttttggcagcttttgcctcgtttaatttaacaattgaacgttccatgctcacagctataaatgatgaagcacccaattcagtagctttttgtagcaaccactcatatttgtcagctttgattagtccactgcaaatcgtaacatcaactggcaattctgtattaatattttgtttttcttttaaatcaacttcaattttatcacttgttatgtcagcaatttcacataaataaactgtttgatcattaaaagttaaaataattttactaccaacatcatatctcattacatttgttatatgatgaatatcttctttttttgtaataaaaaaacgctgacttacatcagcgttttggtctatgaaataacgttgcacattattcactcactttctggccaacaagacaaacccaaccgttgtcatgttgttctgaaataattttaaaacctacacgctccatatgtgactgtataccttcatacttctcttttataataccagaagtaataaaataaccgccttcatttagagtattataagcatcttcaatcatttcatcaataatatgcgctaaaatatttgctattacaatatcaaatttttctgtttcgtctttcaataagttacctggaacagcttcaattaacgtttcacaatgatttcttctgaagttttctttagctacactcactgccatttcatcaatatccaacgctttaatacgttttacaccgattagatgacttgcaatacttaatatacctgagccagtaccaacatcaattactgaatgctgtggcaatacatatgtttctattgccttcaaacacatacttgtagtcggatgatcacctgttccaaaagccatacctgggtcgagctcaatgcaaagctcttcatccgcttctttagcatatgtttcccaactaggaactattgtgaacttcttcgacgctcggaatggatggaaatagtttttccattcattttcccaatccgtctctgcaataatttgctcactgaattgaacgttatgttgatcaagttcatctaaatttaataactcatctttaatttgctgtcgcaacttatcatcataagtcatttcattaaaataggctttcaatcttactcccttatctggataatcctcttttttcaaagcgtaaatttcaccgtatttatcttctggttggttaattaaatcatctgaatcttctatcacgacaccatttgatccatgattttcaagtatattggtagccaattctactgcttcatgattaataataattgaaagctctgtccagttcatactttattctcccttaaagaatctttttgctctatctttaaaattcgaaggttgttcattaatttcttcaccatttaattgggcaaattctttcattagttctttttgtctatctgttaatttagtaggcgttactactttaatatcaacatataaatctccgtatccatagccatgaacattttttatacccttttcttttaagcggaattgcttacctgtttgtgtaccagcagggattgttaacataacttcattatttaatgttggtatttttatttcatcgcctaaagctgcttgtgggaagctaacatttaatttgtaataaatatcatcaccatcacgtttaaatgtttcagatggtttaactctaaatactacgtataaatcaccagcaggtcctccattcacgcctggagagccttcaccagctaatctaatttgttgttcattgtcgacaccttcaggtactttcacttctaatttaactgttttattttcagtaccttttccgtgacatgttggacaagcttcttcaaattcttgaccacttccattacatttaggacaaacttgttcagtacgaactctacctaaaattgtgttttgttctacagctacatgaccagcgccattacagtaactacaagtctttttacttgttccaggctttgcaccatcaccatgacatgtttcgcatgttacatctttacggattgaaatttcttttgttgtaccaaataccgcttcttcaaatgttaatgtcattgtatactgaagatcatcacctttttgcggtgcatttggatctctttgtctgccgccaccgaagaaagagctaaagatatcttcaaaaccgccgccaccgaagccactaaaaccgccaaagtcagagccattgaatccttgtccaccaaaaccttgtggaccatcatgtccaaattgatcatagcttgcgcgtttattatcatcacttaaaacttcataggcttcagaaatttctttaaacttttcatctgcaccttcttctttgttaatatctggatgatattttttcgaaagctttcgatacgcttttttgatttcatcttttgaagcatccttactaatgcctaaaacttcataataatctcttttggccacagctatctctccttttcttaattaactcatatagtttaacgtaatatgtcatactatccaaataaaaagccaaagccaatgttctattgactttgacttttcagatcatgacaacattctaattgtattgtttaattattttttgtcgtcgtcttttacttctttaaattcagcatcttctacagtactatcattgttttgaccagcattagcaccttgtgcttgttgttgctgttgagccgcttgctcatatacttttgctgataattcttgaatcactttttcaagttcttcttttttagatttaatatcttctatatcttgaccttctaaagcagttttaagagcgtcttttttctcttcagcagattttttatcttcttcaccgatattttcgcctaaatcagttaaagttttttcaacttggaatactagactgtcagcttcgtttcttaagtctacttcttcacgacgttttttatctgcttcagcgttaacttcagcatcttttaccatacggtcgatttcttcgtctgataatgaagaacttgattgaattgtaattctttgttctttatttgtacctaagtcttttgcagttacatttacaataccgtttttatcgatatcaaacgttacttcaatttgaggtttaccacgttcagctggtggaatatcagtcaattggaatctaccaagtgttttattatccgcagccattggacgttcaccttgtaatacgtgtacatctactgatggttgattatctactgctgttgaatagatttgagatttagatgtaggaatcgtagtgttacgttcaattaacgtattcatacgtccacctaaaatttcaatacctaaagatagtggtgttacgtctaataatactacgtctttaacgtcacctgtgataacgccaccttggattgcagctcccattgccactacttcgtccgggtttactcctttgttaggctctttaccgatttcttttttgacagcttcttgtactgctggaatacgagttgatccaccaactaagataacttcatcgatatctgagtttgttaagccagcgtctttcattgcttggcgtgtaggttccattgttcttctaattaatgaatctgataattcttcaaatttagaacgagttaagtttacttctaagtgtaatggaccgttttcaccagctgagataaatggtaatgagatttgagtttgtgatacacctgataagtcttttttagctttttcagcagcatctttcaaacgttgtaatgccattttatcttgagataagtctacgccattttcttttttgaattctgcaactaggtagtcaataattacttggtcaaaatcatcaccgccaagtttgttgtcaccggctgttgatagtacttcgaatacaccgtcacctaattctaggatagatacgtcaaatgtaccgccacctaagtcaaaaacaagaactttttcatctttatcagttttgtctaaaccatatgctaatgctgcagctgttggttcattaatgatacgctcaacttctaaaccagcaattttaccagcatctttagttgcttgacgttcagcatcgttaaagtatgcaggtactgtaattacagctttgtcaactttctcacctaaatagctttcagctgtattttttaagttttgtaaaatcatagctgagatttcttgtggtgtgtatgatttaccttcaatatctactttataatcagtacccatatgacgtttaatagattgaacagtgtttgggtttgtaatagcttgacgttttgctacttcaccaacttgagtttctccatttttgaaagctacaacagatggtgttgtacgtgaaccttcagggttttgaattacttttggctcatcgccttctaatactgttacacatgaatttgttgtacctaagtctataccaataattttactcataataaaattcctccatttaatcattaaattaatttaattttaaacaatgtcttttcgccaaatttaagttattggtttactttgaccattgatggtcttaatactctatctttaagcttgtatcctttttgtagttcttgagtgatttcgccagattcaaaatcagggttatcatcttgaactacagcttggtgaatatttggatcaaatgcttcaccttcagttttaataacttcaagaccattatcttttagtgcgttaatcaaactttcatgcaccatttgtacacctttttgaagagatttaaaagtctcatcatcaccttcaatttgaagtgcacgttctatattgtctattgctggtaaaatatctgttaacacacgttgtgcttgatatgttttgtttatttcattttctttttgaattctacgcttataattttcaaactcagcgtagagccttaaatatttctcttcgttttcatctgctaattgttgaagttcattaattttttgatcttttggatctatttcttcaataacattctcgtcagacgtttcttctattgcttcatcttgtaaatgacctttactttcttcagcttgttcaactgaatcatcaatattttgtttgacgtttgtttcttcaactgttgattcagtgtttttttcaactgattcgtctttatttgtcattttctgtcctccaatactttctaatccatcattaccaaattctatttaataattgaatgacattttgataatgcatagctgtaggtccaatcacagcgatttgaccttttaacgtttcatcaaaatgatattgacttgttacaattgaaatatcacttaagctgtcatcaatttcattaccaatttttacattaatatttggtgaagatatatcttgtaataattctgcaattctatttgattctatatattgtagaatgggctgaattgaagatacattactttcattcaatgcatcaataagtttaacctttccacccatataaatgctattactttgattagaaatatgattattcatcgtatttaacaatttattgataaaaatttcttcctgctctgattgaacaaaagagacaatatcatcttgtaaattctgattaaactcagttagtttgtttgtaacaaaatttgatattgtatttagtttgtcattattaaacggtatgtctgaagcaagatgtacatgctcaacatgacctgatgaaaatacgataaccattataactaaattaggattagcacgaatcaagtgtacattattgataatatcttgtttatgattaggatgaacaactaaagttgtatattgagatatatttgataattcatctgcaaaatatgtcaatgctgatgatacatcatattgattctcaactaacaattgatttaatcgtcttaatttatttgttttttgatgagatgtttgttcaagtaaacgattgacataatacctaaaacctaattgtgatggcgaacgccctgaagaactatgtgtcttctcgatatagtttaaatcttcaagctgtttcatctcatttctaattgtagcaggactaacattcaagttatgtcgctcaattagtgttttagaaccaacgggttgtccaaaatcaacataatcctcaacaattgcgtttaatatactcaattgcctatctgtaatcatgttttcacctcattagcactcacttatctcaagtgctaattataatttatcaaattggtcaaagtaagtcaatgttaaagactcgaaatttcaattttttttaatcatttattaggaaagcttcaaaaacctcattacctatgactttccctctatttgtaagtgcaatcacatcgttcttttctacaattaattccttctcttttaaattatttattgtttgaccaaagacactttcaatagattggtcaaacttctttttgaacctactactactcacaccttcatttaaacgcaacccaagaaacatttcttcttccattctctcagtcaaagaaggtttatttgatactaaaattgctttactttctttatttatagctttgatataatgattcactggattgatattcgtataacgcacaccatctacataaccacttgcacctgctccaaatccataatattcctcattaaaccagtaaaccttattatgttctgattcatggccatctaatgcaaaattagatatttcgtattgatggaaaggagattgttctatcttagacatcagcaactgatacatgtcagcacctaaatcctcattaggaagtttgagcaagccttttctatacatattataaaattgggttttaggttcaagtattaagccgtaactcgaaatatgttgaatatccatatctaaagctagatctaaactttgttcaaaatcttcaatcgtctgtttcggtaaatgatacattaaatctaaactgattgatttaatacctgcgtttttagcatttaacaccgaagtgtaaatatcttcagtattgtgcgttctacctaaaacagacaataactccggcttgaatgtttgaacgcccattgaaatcctttttactccatatttctctaatagttggactttctctttagttaactcatcaggatttgcttcaaatgtatactcgcctgtgattgtaaacgtatcacgtattgctttaagtaatctttccaactgattaatagaaagggccgttggtgtgccgccacctacatacatggtctttaagatcctatattttgctgtagacatttctgtgattagtgcatctaagtactcatctacaggttgattctgtataaaatatttattgaaatcacaatatgtacatattcttacacaaaatggaatatgtatatatgcactttgtaccgtcattttaatgccccgcttctcagactttttatccaatcggctatatcctgttggactatctgcaattattcttacttttaactttaacgtttaatcaatgattgtctaatatatcgattcattttaatatttattcttgtttagagggagtgagatagaaataataaagaaccactaatgatttattatgtagtggctcttacacattagccagatgtaatatgtccttaaaaataaaattacatgagtaaaactcatgcataagggagtgggacagaaatgatattttcgcaaaatttatttcgtcgtcccaccccaacttgcattgcctgtagaatttcttttcgaaattctctatgttggggccccaccccaacttgcacattatagtaagctgacttttcgtcagcttctgtgttggggccccattgttataagctcattttaactctgtcgatggctgccaatataacattgtaaagcccaggacgttaatttatcctaggctccctctttttagttattaaactttattcattgtaaattgttaattgattttttaaaattattcatcatccattttcaatacagccaagaaagcatcttgtggaatttcaacattaccaactgctttcatcttagctttacctgctttttgtttttcaagtaatttacgtttacggcttatgtcaccgccataacatttagctaaaacgtttttacccattgatttaatatttgtacgcgctacaattttttgtcctattgcagcctgtacaggtacttcaaattgctgtcttggaattaacgttttaagtttttcaactaatgctttaccacgttcatatgcaaaatctctatgaactatgaagcttagcgcatccactttatcaccatttaataaaatatccatcttgactaaattactttctttattttcgatgaattcataatcaaatgatgcatatcctttagtattagatttaagttgatcgaagaaatcaaatacaacttcagctaaaggtaattcataaacaatatttacacgaatatcatctaaatagtccatatttataaattgtccacgtttacgttgacataattccattactgcaccgacatagtcatttggaaccatcatagttgcacgaacatatggctcaaatattttatcaattttatcacgatctggcatttgtgctgggttatcaaccgtcacttctgaaccgtcccttaaaacacattgataaattacagatggtgcagttgcaattaattcaataccaaattctctttcaattctttcttgaattatttccatgtgtaacatacctaagaaaccagttctataaccaaaacctaatgcttgtgacgattcaggctcaaattctaatgatgcatcattcaattgtaatttttctaatgcttctcttaaatcattataatttttgttatctattgggaacagtccgcaatataccattggattcattttcttataaccttgcaatggttctgatgcaggtctactagctaatgtgatggtgtcaccaaccctagaatcatcaacatttttaatacttgcaataatataaccaacatcaccaactgttaattcatcaactggaagctgcttaggtgtattaattccaacttctgttacttcgaactctttaccagtggccatcattcgaattttatctccggctttaacaacaccgtccacaattcttatcgatgaaattacccctctatatggatcatactcagaatcaaatattaacgcttttagtggtgcttctgggtcaccatctggagctggcacaacttcaactattttctctagtatctcttcaattccaatgttagatttagcacttgctaaaacaacatcgtcttggtctaaacctatcatatcttcaatttcttgtttcacgcgttcaggttctgcagcaggtaaatcaattttgttaataacaggcaataactctaactcattatctaatgctaaataaacatttgctaatgtttgtgcttcgataccttgagccgcatctactactaaaatcgcgccctcacaagctgccaaagaacgtgacacttcatatgtaaaatcgacgtgtccaggcgtatcgattaaatggaatgtataagtatttccatctttagcttcgtactttaaacgtactgcgtttaatttgattgtaataccacgttctctttctaaatccattgaatctagtaactgatcttgcatatctcttgtttcaactgatttggtattttctaaaattctatcagccaatgtagattttccgtggtcaatatgtgctataatcgagaaattccttatattctctcttctttttaagcgttgctcattatccattttatccttctcactttcataaaataaacccgtattatctttcgcatctttgatataataacgtttttaataggtaaatgcaaacgccataatcttggatgaactttgaaattataacaatctttatttaaatacatacttgcgatatgttaatatgttaattacgtacttataattataaaacgtattgattgtgtttccaacacaatttattaaatctgcaaaattttaagctaaccccatcaaataaatgattgcacaacggttagacttttgttaaaatatttcttgttgtaatcaaataaaattttgataagatgaactcacttttaggaggtgacagaaatggcaaatatcaaatctgcaattaaacgtgtaaaaacaactgaaaaagctgaagcacgcaacatttcacaaaagagtgcaatgcgtacagcagttaaaaacgctaaaacagctgtttcaaataacgctgataataaaaatgaattagtaagcttagcagttaagttagtagacaaagctgctcaaagtaatttaatacattcaaacaaagctgaccgtattaaatcacaattaatgactgcaaataaataatctttttaaataaaagttcaagcgcatgcttgaacttttattttttataaagatagaatgaataattccagtattaactgtttatccatatatgatgatttaagtttataatcagtttccgcacaagcatctataatattcaataattcatcaagttgataatgtcttacttgtcctaacgctaattttactctgtatggatgtactcctattgttttagcaatttgctgtccactatatcctttttgactcagaatcttacattgataaaataatcggtaattacttgtaattagtgcaagtaatttaattggttcttctttcatagttattaaatcttttactaaatgaattgcttgttctttctttcttttctgaatgtattcagtcagtaaaaatacattttgctctaaacttctattaataatttggttaacatcctgcttattaattgttggtctatcgcctaaaaataaaatcaacttttctatctcttgtgagacaatattaaagttaatacctgtcaactcaataaataaatctaatgcatctcttttgatatctttgaaattctcatttaatttactttgaatccatttttttatttcttcttcagacatttgctctatttttttaagccttgcatgcttttttagagttttagttaacttttttctttcatcaagtttattttgatatatctcaaagacaatcaaattttcgccatcatatttttcaataaattctattaattgatctacattatgagccatatcttttggcgctttttcacctgtaaatatatatgcatttttaaccaaaattgcttttttatctgaaaagaaaggcaatgttaatgtttcttcaacaattggtgcaatctctgtttcgtataaattatatttcacaaagttaaagtcatctctatcacttttcaaaaattgtgatatgatttctgcactttgtttttcaaccaattcaggcacatctccataaatagctacaatattgtcgctcattcattacaccctttcattcgtttgacacatcaatagattatatcatgtttctgtatctataaaccacttgcatttccataagagcttgaatcaacttttaaattatcatctaagtcaattgtaacttgaccgttttgttgactattgtaaatgcgactgcgaatcctttgcaatcgtttaacaacttctatattaggaagatgatacatattgttcttcccagaagaaatcaaacttattttaggcttaatcatctctataaattctttagaactacttgtcttgctcccatgatgtcctacttttaaaatatcaatctccggcaagttatatttttttagtagtaaagattcattatttttactagcatcgcccattaataaaacttttttattttgatatgtaatcatagtaataatcgaatactcatttttatctcggctatttggaataaaactatcaaaaaatagaaaactactatctccaagtttaaaactactaacttgtcttacatccataagtttaatgttgtacttatggcttaatttcgataataacatcaatgtattactactatatcccttattgtatatcactatatgtttaattttaatatgactaataatatattccacttcaccaatatggtcattgtgtggatgtgttaaaattagatactctaattcatttatccctctttcatttagcgttggtaaaatatgatatttagaaattgaataactaggttgtttagtatcatcaatcactttcccacctgtatcaatcaagacattttggttcttaccgccttcatataaaatactgtctccctgccccacatttaacattgtaattttgtgatgtgaatttgttggaaacgttattaataatgtcagaataattatagtccaaaacgtaaccaatatatatttacgtttagccaataaccaaaatatgtaataaacagaaattataaatactataaatatccaatcattaaacttgggaacagaaaaatgtgattgcttgattcttgtgaataggtctagtaaccagtcatgaaaattaaaacttaggtcaaccaagtaatttagcggcgttaatcccacaataaaatgacttgtaataaagaataaaatagatagcggaaacaatataatcgaatagtacggtacaaaaatcaaattagataaaaatcccacccattgaagttgatgaaagcttggaatggcaacgataaatgaagctaattgtgcaataaacgtaattatgaataatgattgtaactttgacaattgctgtaaaaaaggaaaaagtagcataataaaaaatgaaatgatgaatgaaaattgaaatccaatatcataaacaactagtggatttaaaataaacataattataaatgcaaatgctaatagctgaatactctttattttaatttgcttagtaataaccagtacaagagttgtcattattatagctcttacagcactaggtgcataatttgtgtattgagcaaataaagctaatacaatgattgtaattcctttaatgacaaataaaggtaaatttaatcgttttaaaggttggtaaattaaaaatacaattgcagctatatgcgagccactaactgccagcaaatgatatatacctatctctttaacacgttccttaaattgctcattaacttcttttacgtcaccagtaatcaatgtcataatacgatccggaaacttaatacccgaatcataaattcgattcattataaactgtttatgtttctcaattaaattagaccggttcgattctaggcagctttgtacaactatactttgtaatttaagagttacaaacttattgtcattaactttgaattgtcctttaacaatacaattacgactttcaattttctttaaatcaaaattctttttatctgttaaaaagaaaggatatatttcattttttaaactcaacctacctttatatgtgtcactaccttgacgttgaatttggattacttgagcacgctcattaaactgagaattacgttcaatataattgatataattaaatattgcttgttgtgaataatgtaaataccatgcggagaaaatgattaaaaagagagaaataggggcataaacgattttatttttacgataagtaatatacaaaagtaaaatgaaaagaaatgtagagagcactttgctagaattccaaagcactcctacaatcattgataacgcgacaaacagcaaaacattaacctttagtcagatatttagcaacatattctggtgaaaatggaatttttttaaattcaataccagattgtttgagtaatttagttgcatattcatggttatgataatcttctgcatagtagatacgctttatacctgcttgaataattgactttgtacaatttaggcatggaaaatgagtaacatagattgttgcaccttcagtagatacaccttgttttgcacattgtaataaagcattcatttctgcatgtatcgttctgatacaatgtccatcttcaattaaacatccttcatctatacaatgcacctcgccagctacagagccattataaccaccagcaataatacgattatccttaacaatcgttgcacctacagataatctttgacaagttgaacgtaatgctagcaaatgactttgtgccataaaatattcttcccatttgattctttccaagatgttcaccttccatacttaaaatttagtaacattttctaataatataagattaatcacaaaaaataaaatttgcaattaaaataatccattatgtcgtgaaataagatttcagtttatcaaaagttttacttccaaaaccttttacttttttcaaatcgtcaatttcttgaaatgcaccttgttggttgcgatattcaacaattgcattagctttagcttgcccaactccaggaacagacatcaattctgatacagatgccgtatttaaatttactttagtattatttgtgttcccatttttttcgtgcacactgtttacttcaatttgtggttcaacattcttttgtcctttatgaggtatgaaaatcattttttgatctgttaatttttcagacaaattaatttgacttacatctgcatcctccaataattgtgctttatcaagtaaatcaactactctatccttagatgtcattttataaacattaggatgtttaacagcaccttttacatcgacatatacaggacccttatttttggaattatctccatctttgacctggacatcttctactttggacaaactactattttcactagtgctttgtttcagagcagtatctttattttcaaaatttcttgaagtataatcatcttgtctccagaatataaaaccaattaataccataattaaaacaacagcacttagaatatataacttccattgagttaaaaaatctttatagcgtaataaaaattgatacaataaaaccactcctcaactttatacacgtctgagcgagtggttttacttttattttttcgcaatgaaaaacaatctttctgcatcttcattatgttcatctatattaaaatcagtaaatgtttcaacatgtttaaaaccaacttgagctaaccaagacaaatatgtcttttcatcaaatgttctctgaaaatgagactcatcaaatcttgaatatgtttcatcttcatgtcgaatgaaaaatgtcatatcatgataaacacttaaaggtaaatctccttgcacagcatcccatgctaaaaaatgtcccctttatcatcaatataactttgattattaaacaaagtcatcattttataaacagtatgtacatcaaaaataaatacacctgaatcagtcagatgatgataaacattgatgaatgtttcaatcactgcagtttcatcttgcaaataatttagagagtcacaaaaaatagtgatgatatcaaattgttgttgcaaatcaaaagatgtcatatctccttcaagccaatttacatttgctgatttttgagctgcaacagtcaacatatcaacacttaaatccataccagtaacattacctaaagcttctaattgaactgttaaactaccagtaccgcatccaatatctaaaatatttgattcatctttgcagtgattttttacaatttcaaaccatttttcatatggttgatcttgagtcaattgatcgtacactaggctcatttctgcatattgcgacataattaatacgcaacctgactatatgattctaatggtgcatcttgatataacttttcaatattataataatttctttcgtctttatggaaaacatgtaccacaacatcagctaagtcaattaatatccaacgcgcttcattgtatccttccatacgttttacttctatattttgttcattggctacttctttcaccgctctagcaatcgcttgaacttgtcgttcattatttccgtgcgttacaacaaaataatctgtcatatcgctgatacctttcatttctaaagaaatcgtatcttcgccttttttattgtcaattgcatccacagcaattgctaataattcttgtgaattcatttaatcatcctttattctttcgtcactatagttataataatttaaacagtcaatcgtcttattatataccgtaatatctttctgtattaaaaatagtactgtgcgtttagaaatttcataaattgtcttatctaaactaccttgattgtatgccatatctcgaatatcatcaactcctgggattgttcttccaggttcgatgtaatctgcaataaaaatcagtttttcagtttttgtcatttgttgacgtccagtagtatggtatttgatagccattaatacttcctcatcattgataccatattcatgttccatgattgctgcacacacagggccatgcaatatttcactaccataactcagtagatcattacctaattcgtattgtcgaacaatttgatacattttacctaaatcatcatatttacagaaatcatgtaatacacctgctaattctactttactagtgtctccatcataaatttctgccaatttaatcgctgtttctgcaactcttaaagaatgattataacgtttctctggcagtttctcttttgcaagccgttttgctttttcaatgttcatataatccttcccccttaatatagttttcaacggatttaggaacaagaacttggatagatttcccttcactaactctttgtcgaatcattgtcgaacttatatctaccctaggtatctgaattgcaatcatagcattttcaacattttgactatttttgtctcgatttacaactacaaaagtaaccatttcttttaagtattcaatttgataccatttctctagttggttatactgatccgtcccaataacaaagtacaactcactgtctttgtgttgctccttgaatgccttgatcgtgtcataggtataactttgaccaccacgtttaatttcatcgtcacaaatatctccaaaaccaagctcgtcgataatcatctgtatcattgttaatctgtgctgaacgtctataaaatcatggtgctttttcaatggagacataaaactaggtaaaaaataaaattcatctggctgtaattcatgaaatacttcgctagctactatcatatgtgcagtatggatagggttaaactgaccgccgtaaagtactatctttttcattattatggcaattcaatttctttattatctttagattctctataaatcactatcatagatccaatcacttgcactaattcactatgagtagcttcgcttaatgtttcagctaattcttttttatcatcaaagttattttgtagtacatgtactttaatcaattctctgttttctaacgtatcatctatttgtttaatcatattttcgttgataccgccttttccaatttgaaaaatcggatcaatattgtgtgctaaacttcttaagtatcttttttgtttgccagtaagcatatgttattctccttttaattgttgtaaaactgctgttttcatagaattaatatcagcatctttattagtccaaattttaaagctttccgcaccctggtaaacaaacatatctaagccattataaatatggtttcccttgcgctctgcttcctctaaaataggtgttttatacggtatataaacaatatcactcattaaagtattgggagaaagatgctttaaattaataatactttcgttatttccagccatacccgctggtgttgtattaataacgatatcgaattcagctaaatacttttcagcatctgctaatgaaatttggtttatatttaaattccaagattcaaaacgagccatcgttctattcgcaacagttaatttgggctttacaaattttgctaattcataagcaatacctttacttgcaccacctgcgcccaaaattaaaatgtatgcattttctaaatctggataaacgctgtgcaatcctttaacataaccaataccatctgtattataccctatccacttgccatcttttatcaaaacagtgttaactgcacctgcattaatcgcttgttcatcaacataatctaaatacggtatgatacgttctttatgaggaattgtgatattaaagccttctaattcttttttcgaaataatttctttaattaaatgaaaatcttcaattggaatatttaaagcttcataagtatcatctaatcctaaagaattaaaatttgctctatgcataacgggcgacaaggaatgtgaaataggatttcctataactgcaaatttcatttttttaatcaccttataaaatagaatttcttaatacaacatcaacatttttaggaacacgaacgattactttagcccctggtcctatagttataaagcctagaccagagatcataacatcgcgtttctctttgcctgtttcaagtctaacagcctttacctcattaagatcaaaattttgtggatttccaggtggcgttaataaatcgccaagttgattacgccataaatcattagccttctccgttttagtacgatgtatattcaagtcattagaaaagaaacaaactaacggacgtttaccacctgatacataatctatgcgcgctagaccgccgaagaataatgtctgcgcctcatttaattgatatacgcgttgttttatttctttcttaggcataataattttcaattctttttcactaactaaatgcgtcatttggtgatcttgaataatacctggtgtatcatacataaatgatgtttcatctaaaggaatatctatcatatctaaagttgttccagggaatcttgaagttgttactacatctttttcaccaacactagcttcaatcagtttattaatcaatgtagatttcccaacattcgttgtccctacaatatacacatcttcattttctcgaatattcgcaattgatgataataagtcgtctatgccccagcctttttcagctgaaattaatacgacatcgtcagcttccaaaccatattttcttgctgttcgttttaaccattctttaactcgacgtttattaatttgtttcggcaataaatccaatttatttgctgctaaaatgatttttttgtttccgacaatacgtttaactgcattaataaatgatccttcaaagtcaaatacatccacgacattgacgacaataccctttttatccgcaagtcctgataataattttaaaaagtcttcactttctaatcctacatcttgaacttcgttataatttttcaagcggaaacaacgtctgcaaatcacgtcatcacgaaacatattatgctctggtacaaaaccaggtttatttttatcttcagattgaagtggcgcaccacaaccgatacattttaaaatgtcagacaatcaattttcctcccatgtgatataaccttttttactgaaatgacgtaataatcgtctttcaattaatctattaaacttagtaataaagccatcagttcgtttaactggaacaaccataattgtatatagacctcgacgattaccaccaaatacatcagtaagcatttggtcacctataacaacagtttgatctggtctgatattcatcttagttattgctttatcaaacgctttccccattggctttctcgctttaaaaataaaatcgatgtctaaatgctgactaaaactagcaacacgagactcattattattagacacgattgtaatagtgattcctttttcattagcttccttaaaccatgctttaacacgttctgtaggttctttaacatcccaacctactagcgtattatctaaatctgtaataatacctttaacgcctttgtccactaacttgtctaaatcaatttgaaatattgattgaacatatgaattcggcataaaaaacttgcgaactaaacccatttaactcacctttacctttttataattgagacactaatgcttcaacagtttgacttgatgatacagctgctttttctaaaaatgcttcgaagctcatttccgcttctccatttgctaagtctgaaactgcacgaactacaacaaatggtacattaaattgataacatgtttgtgcaattgcagttgcttccatttcaaccgccatcgcatttggaaatgcttttttaattttttggcgttgttcaacactaccgataaagctatcaccacttacaattaagcctactttagctgttaattgttgttgttgtacaacttgagatactttttctattaaaggtttacttgattgaaatgctaccggcatctgtggtatttgtccatattcataaccaaatgctgttgcgtctgcatcatgatattttacatcatcacttataagaacgtcacctacatttaaactttcatctaaagctccagcagaacctgtattaataatgacgtccggtttaaacttattaattaataatgtcgtagaaattgcagcattaacttttccaatgccactttgggtaatcactacttctctatcttttaaaatgccagtataaaatttaacatgtgcaactgaaatttcgcttaattgtgttaatttattttttaatattgttacttcttcttccatggcaccaattataccaatcatcttttgattcacctcttttaaaaaatcctagcatttgttattttatcacattttaatcactacaacgacaagtatcatgattttcattactgtataaaacttttgctttatttttataaaaagctctttcaataacttggtatcataaataattatttttgaactcataacagtgaattcgatgcttctaatttgtctatttttcaaaaactaatcatatcaattacatcaaccaatcgtgtcaagaaactttattaaataacaggaaaatgatatgtttaaaataataatgatgaaataagaggattttacaatggctgaaaataatcaaaatagtctcgtaacaaagatagctacatacggcagttttattgcaattgcgtcgtttgtcattttatttataagtatatttttaaagttttcatttaatatcgagtttacagcaacaattatgaacatatgtcgctacactctaattctaggatttatacttatgtccttacctgatgttgttgataaaaacatcaagaaaattatattcgatgcatttattatcatcgtctttatcttctttttactatagtagttttattttgtaattacacagttaatcatatttgtttcgtatcgaattcctttgtgcattaaagataattctaatagaaaacagcagtaagacttttctaagtgttagcatccttactgctgtttttatttgtaacaacataatgacaggtactttatatttcactgtcaaagattattaatgattaacttaattaaattatgatttgaataaatagatatctaaatgcaatttgtcactattgatagttttattatcagcatacatttttaatacctcacgaccatactcaccatttaaattataaaaatcatattctacattttgttcatcatcattataatatttaacataccctttaacaatgtcgccaccttgttcgtacaacttatacttctcattcaaataatttcttaattgaacctctaattcttgaatagtaacaattttctttttcgtttttactgcagttagttctatttctgtttgatgtccgtcaatccataaattacaaggtatattcttataatcatcgtatttattattgtcacttaaagtaacaccaccataactacattgcgttttattggttgctcccccatgacatccgtatccataatttccagcaaatatatcgatatccttatttataaatttctttgaaagtgcctcattttcaaattcaactttaaaatcctttttccaatcatcatttacgaacatgtcatgaaataacaaatcatgcttcaacagtctatcgtttgtgtttttattttcaagctgagttggattgatgaatgacatcttagcattacttagacgctttgaatcaaacttacttttatgatgtaagtctgaatattcgattgcactcgctgaatttgtaaaaattccttctaacaataatattaaaataaatcctgttaaatatttaacttcaaactcccccaaaacaattattaatttacatttgagagcgagacataaatgataaagaaccgcttatggtttattatgtagtggttcttgagcctacaattttgattatgtatcacgctcataatacttttcaatttgaaatactctgttcgcaattattagttgagttatatcaaccaatacagtgtatacctaaaaattccaaaccgtttaacagtatataagaaaaaatgataatcatttcttttatttttattaaatttcataatgattcatataatattctcattaaaacatcacaatactgatacacaacaaaaagagcagtacatttgtcatgcaccactctcaacaaatatattttttcaatgaagcaattacgcgatcttacaaatactataagtatagctgatcacatattatatttattttataatcgaatttagaaattcatcacttatctcataaattgttggtctacttttaattttaactaagtagttatcatattttttaattgtattattaatttttactcttcctactcccaatatgttttctaaatcaattaatgttaatctatttcttttatttccaaacaatttatccattgaaaggagatacaaaaattcataatctatctgtttataatgactagttaaataaagcattaatttttcagtcgcatccatttttggtattaactcatcaagtattctttcttgtcctgctatcaatagctcaagcattgtgtcaataaattccgtcaaatcaccacaattcaaatgatttgaagcagtcataaacgccttgtaatatttcgatttatttctatttataacatatgaaaatgtcaaagcagtataattatcataataatcactcaagagcttggcaattataaatcttccaactctaccattgccatcataaaaaggatgtatatattcaaacagataatgactagccatgattttgaacggctgaggcgcatcaaaatattttaaaaatgttagcatttcacctataaattcaacaattttggtttcaggttgtaacccaacatgtatatgtttattcgttgacccatcatgcacaccgacaaaatttttacgaaatagctctccatctaacttatcttgttcgttaatttcatttgaaactaatttatcataaatcgctctaatgtctcttacattatcaactttaatttttttattaagttctatctctttatattgatccacgaggcctctgaacttaagaaattctgatgcttggttatttaacgcatgtgcaatctcttgtttagtactaaatacattttcaatttcattagtactttgtaattcatcgattaataaatcattaaaatattgttctctagctgcatatggtaaagaattaagtgctctatcaatttttctactattaattgatattaattcttgtttttttgatagatttttagtcaccataaagaatagaggatattccaaatcattaactttttttccattttccataggtatgatattaatattagtattgaaagaagctaaagaattaaatcttttaatatactcttccttcattttactttcattgtgttcatgaaaaatactttttaaagttctgtaacccatttgcagcctcctctactcatttaaaatgtattttttgtccaataaatcaattttcattagattagctaaatattatcactttttttctttaaaaactatataaataactattttctcaatcaatagaaaaagatttttcatcacaacaaaaagagcagtacatttgtcatgcaccactctcccttaaaatatatctaattatgctttataaatgaatcaccggaaatcaaaatatatcttgcctaatactaacaacatttacagtgatgctattagtcgaaatgtcttttaaaataactgaagtacttctttgaatgagaatatacctgtcaatattgtaacaagtactgcaacgataccaaagatgaacatccaatttgggtgtttataatcaccaacaattgatttctttttacttgcaatcaaaattgcacctaacgtaataggtaaaatccatccatttatcgcgcctgctataattaaaaggctgattggttttccaataaataagaaaatcattgttgaaataacgataaacacaatcacaattaaattacttctttcgttaagtgatttatgaagtgtttttaaaaatgttgcgcttgtgtatgctgagccaattactgatgacatagctgcagcaaataacacaataccaaaaatattctttccaattggtccaattgcgtgttcaaaaactgacgctggtggattttcagaacttagtgtcacacctgttacaacaactcctaataccgctaggaatagtaacgttctcataatacctgtagttaaaataccagcaattgctgattgatttacaaatggtaaatattgcttacctttaatgccagagtctaatatacgatgtgcacctgcaaaggtaatataaccacctacagttccaccaactaacgtaatgatgggcaagactaatttcattggatgttctggcgcaaatgtatgcacaaaagcatcaccataaggtggattagaaacaaacatcacatatgccacaactaaaatcatcacaataccaagaatcattgaaacaacgtccataattttttggccacttttacttacaaagattaatattgcaaagattgcagtaatagctgcgccccattttacatctaatccaaaaattgcatttaaacctaaaccggcaccagcaatattaccaatattaaaagctagaccaccaaatgcaatcaatattgagataacagtaccaagcccaggaacaactttatttgatatttcttgacctcttaaaccagttacaactaatatgcgccatatattaatttgtgcaccaatgtcaatgatgatagacagtaatatggcaaatgcgaaacttgcaaaaaattgtgatgtaaatactgctgtttgcgttaaaaatgctggcccaattgcagaagttgccatcaaaaatacagaacctaataataaccttttatgattttttgtgaattcaaagtcactttcttttttaagctttaaatttctccccatttttttagccccctataaggattgaatatcaatgccttctttcattaaaatttctctaattttcgaaacaaataataatgcatgttctccatcaccatgcacacaaattgtatctgcttgtaacgttacttccttattgttttttgaaataactttattttccttcaccatctttaaaacctgcttaagtgcttcgtcagtatcagtaatcacagcatcactttcttttctactaacgagctgcccatcatcttcgtatcgtctatcagcaaacacttcagaagctgtaattaatccgacattctttgcttctgaaattagatatgaatttgctaatcctactaacactagtgatggatcaaagtcataaacagcttgtgctataacgtttgctatttctctgtcttttgcacccatctgatacaatgcaccatgcggtttaacatgattaattttaacttgatgaatgcgacaaaacccttgtaatgcacctaattgataaatcatcaaattataaatctcgtcgttagagatatctatatttcgtctgccaaagcctttcaaatcaggtaaaccaggatgtgcacctactgcaacattatgtgctttggcaagttttaccgtttcattcattacattttcatcaccagcgtgaaaaccacaagcaacattcgcacttgtaattaacggaataatttgatgatcaccaccaaaggaataatttccaaatgcttcgcctaaatcacaattcaaatcaactcgcattataattccacccctttaacaatttgatgtttttctaaaaatttaatatcaacatcttttgcatctccatcacgatatagtggataatttaaaactgcatataaaaaatcggcagttgtagaaaatccatctatcaccatttcatctaaggtgactttcaacttatcaattgctgaagctctatcatgagattttacaattactttagctactaaagaatcataatatggtgaaacttgataaccgtgatatagtaaagaatcgactcgcacattaaagccttgaggtaaatgtaacgctgtcactttacctggtgttggttgaaatttcttttcaggattttcggcatttattctcgcttctatcacatgaccattaaattgaatatcgctttgtgaaaaaggtaaatgattatgttccaataaatacagttgtgctgcaaccaaatcacgttctgctcgcatctctgtaacagtatgttcaacttgtattcgagcattcatttcaataaagtaatgtgcggtatcagttactaaaaattcaatcgtacctgcacttctataatttgctgcacgtgcaactttaacagcatcgttacatatttgttgtcgtctttcttcagttaatgctgcacaaggagattcttcgattaatttttgatttttacgttgtacagaacaatcacgttcccctaaatgtacataattatcctgcccatctcccataacttgaacttcaacatgttttgcaacaggtataaaagcctcaacataaacacgatcatcatcaaagtatttttttccttcacttttagcttctttaaatgccttttctaaatcttcagctttctttacaatacgtatacctttaccaccaccgccactggcagctttgataacaactggataaccgatgtctttggcaagattctcaatttcagacacatgattcacagcaccatttgatcctggaatcacaggaacacctgcatgatgaactgtttgtcttgctgttattttatcccccatcatttccatcgtttttttagtaggccctataaacgctatgccttgttcctcaacggtttgagcaaattttgttgattctgataaaaagccatatcctgggtgaattgcattagcaccagtgatttgtgcagcagatatgatgcggtcaatatttaaataactatctaaagcattagcttccccaatacatatagcttgatctgctaaatgtacatgcaagctttgctcgtccccttttgcataaactgctacagtttcaatcccatattctctgcaagctcttataatccttacagcaatttcacctctgttcgcaattaaacaacgaagcatttacttaccccctttacttaatacgtaccaaaacttggtcgtattcaacatttgtgccatgatcagctactatttcagtaatttctccagcaacatctgttgttacctcgtttaatactttcatcgcttcaacatatcctataatatctcccttgttaactttgtcaccgacattcacaattggttcagttaattctttactatcttgtaaaaagaatgtacctatcattggtgatttaatgtcatgataatcatttgtcgaaacatcggagttatcattcgcttttgaagctgtcaaatcattattgttcatactttgatttgattgattactgtgtgcagccaaatgattcgagtcagtgaagtcaatttctatttcatcttcaaaatttttatatttaaatttcttaacatcattttccttcactaatttgattatttgttcgattttttcaatattcattttacaaatccccttttaaaattgttgctaattttttcgaagtatgtcgcaagctagatgtatcaaaaattggagtcttttgatgactcttaagaatttcattaaacagagacatttgttcccgattcttatctacagcttcttggaatgatatccatttaaattgaattgtatcttgtggtttcatctgtgctaactttggcagatcaaatttgcatacagttgcaattttggtataaccacctatcgtttgtttatcattaagcagaataataggttgaccatcatttggtacctgaacactaccaagagcaaccggttcagaaatgatatctgcttgattaattggtgcaacgctgtcaccttccaaacgatagcccatacggtctgattgttcagtaattaaatatggatgatttacaattttcgctctagcctcttcagaaaatgcctcgaattgaggtccttgaagaatgtgtataatattattttctggcaataaatcgtcctgtaaatgaatcgtctttccaatgttttctttaaagtcattatttattttcactgttattacatcatcagctaataactttctacctttgaatcctcctatactgcttcgggtatgtgttgcataactttcagcaatagaaggtacgttgatagaatgaccaaaagtaagataaccgcgtgcacctttggttatagcacctatttttaaaatgtcacctttctcagctaatatgacagaattcattgatatagttttattatttagcgaagcattaatactaccaccggttataacaaatgtattttgcgtattaaattgaatggtaggaccaatcaaagtatattcaatcgctggaccatcattgttaattaatgactgcgcaaccttaaaactaaattgatccatggcacctgcgcctgaaaatccaatatgttcataacctattcttcctagatcttgtaccgttgaaaagagacctggttgtaaaatcttaattgacattttcaatcaccacccagtcatcaacattaaagttgccatctgatatatctctttcgatttgtataaatttctgttcatctattgcataaaattgtatccattctcctgcttcgtacattgacattggttcacgctcgctgctaaatacttttaacggtgtgcgtccaataatttgccatccgccaggagaatctgatggatatagtcctgtttgattattcgcaatacctacagaacctgcatgaatttttaaccttggctgattacgtctaggtgtatgtagttgttcatcaagtccgcctaagtatggaaatcctggcataaatcctagcatatatattaaataaggtttacttgtatgtttttcaataacttgctcaacagttattcgattatgctttgctacttcttcaatatctggtccatatgtaccaccatattgaacaggtattttaataatacgattggtttgattcacagcatgaacatttttttcattaaatttgttaagttctaaattttcaattaatttagaagatgttatagcttgttcatcaaaatatattagaactgctcgatacgaagggacaatatcttgaatttctaatatttctttttctcgtatccaccgtaccattgctgtgacattacgatatgtctcttcggatattttattttcaaaataaatcataattgtctgctcgttaataaatcttacatccactttaaatccccctttgtattgcaataaaccagtattgaataccttttcattgtatcattgagaagcacaagttgtttaataagtaattcaaatcgcatacaataacaaatgataatcaatttgttttctcggaaatattttgctttttttaaaatggagtagttaatattgtaactcttacactaatttaggttctgctatcattcggtctgatggaaaatttttacttttcatctgtccgattttttgattttgaatataaaaaagcacgaccgaagtatcattaacacacttcaatcgcgcaattaaataatctatttgatcatttattggatattaacaatttttacgttcatttcgccaccattaggtagtggaacacgaacttcatcatctaaacctttaccaattaacgctttagccattggtgattcatttgaaatcttaccattaaatgcatctgattcagctgaaccaacgatttgataactttcctcttcatcacctggtaattctacaaacgttactgttttaccaattttaacaacgttgttatctccagtatcttcaatgattaatgcatttcttaacatatgctcaattctttgaatatcttgttcgatgaatccttgttcatcttttgctgcatcatactcagagttctctgataagtcaccaaatgaacgtgcaactttaattttctctacaacttcaggacgcttaactgtttttaattcttcaagttcacgctctaatttttcaaaaccttcttgagtcattggatattgcttttgattttccatattgtcatcttcctttactgaattatactattgcttgctaactaaagactgaatttttgttgtcataatatctattgcaactttattgctcccaccttcaggaataattatatcagcatatttcttagtcggttcaataaattggtcatgcataggtctaacaacacttaaatattgattgataacagagtccattgaacgcccacgctctttagtatctcgtgttaaacggcgtaatattcttaagtctgcatctgtatcaacatatattttaacatccatcatatcacgtaataccttattttctaaagcgaaaatgccttctacgataataacatctttaggtttaaaatcaatggtaatgtcacttcttgtatgactagcataatcatatgtcggtacttctactgctttaccatttttcaagtctttaagattttcaattaataaatcattatcgaatgcaaatggatggtcataattggtttctaggcgctcgtcgaaagtcaagtgcttttgatctttataatagtaatcttgagcaagtaaagcgacactatgaccttctaagtttttcataatttcgttagttacagttgtttttcctgagccagatccaccagctatgccaatgattgtagtagctttcattagccaatttcctttctcatcatgttgtttggatatatcgggcgatccactttaatttgaacgatttgtaatggatggcgcgccgcgtctaagctgttaccttcttcatcataaattgcttctactacttgtgtaaatgtttcaatttctggaccaaagaattctatttcttgacctggtttaaagttatttcgttgttgaatagtcgcaatttttgtatcttcattatagtctaataccaaaccacaaaaatcaaatggtgattttttagattgttgttgaccaaacatctgttcttcataaccaggtgttccctcaaagaatgctggtgcagtgtctctatttgcacatttatctaactctattaaccattccggattaatcttaaagttgtcaggatctgccgcatacgcatcaatgactttacgatatactgagacaactgttgcaatataatgaattgacttcatacgtccttcaatttttaatgagtccacaccaatatccatcatttgaggaattgattcgattaattttaaatctttaggactcatcgcaaacggtgtaacttcaccttgattataaaaaacatcaagttcaccattatcatcaacttctaataattcataatcccaacggcaactttgacagcaaccgcctctgttggaatcccttgcagtcatatgattacttaatgtacatctacctgaataggcgatacacatagcaccatgaataaatgcttcgatttcaatatctactttttccttcatttcacgcatttccatcgcgccggtctcacgtgctaatacaacacgatccaatccttcttctttccaatattctacagctttgtaattagaaagtgattgttgagtagataaatgaatttcaagttttggcgcaacttctttacatgtttcgataattaaaggatctgcaacaatgatacctgtcgcaccagtcttttccaaattacgcaaatatgattctagaccttcaatattctcatcatgtgcaataatatttgtcgtaacataaattttggcaccgtaacggttcgcaaattcaacaccttcagctatttcttccatcgttaaattatcagcatttgaacgtaatccatattcttgaccacctaaaaatacggcatcagcgccataatgtactgctatttttaacttttctaagtttccagcaggtgctaataattctggtttcttcataactgttttaggagttgatttaatctcttctattgtcttcatgattaacctccttaatatactgtttgtttatataagaaaccttcgtcaaatggtcgatgatcaggttgaatttcttcaattggatccatcaacataaatttctcatcttcatagatttcaggatcttcattgtacaaatctatcgcttgacgatactgttccgttaccacattaatatattcttccgtttgtagaataccatcgattttaaatgaatctatacccgcctcaaaaaatggtgctaattcttcaattaaacaaatgtcgtttggtgacataatgtgcgtaccattgtaatcttcgtaaactgggtaattattttgtctttcttcatcataaagtaataaagattgttcatcattgcgacgttcaattttcatttggcgatcttggaacgtataataattgcctagtagcatacgctttgattgaaacatacaagtcattccttgaacttgcacctcaatttccacatttgaattttcttttatattaataatttcatccaaattcagctcacgtgctaagacagctcttgatgcgcctcttttaccccagtaattacattgaaaatgattagttactaacgtctctgcattccaatgaagtggtattggattttcttgcgccttcacatacattactactgctggatccccgaaaataattctgtcaactcgtatttcatgtaaaaaattaatataatcttctacagcatctaaatgataattatgaaataatccattcactgccgcatatacttttttatcgtttttgtgagctaatgcgacagcctctgtcatttgttgtctattgaattcccctggaagtcttaaaccaaacttttgctcgccaattacaaaagcatctgcacctaaatcaataagtgtttccatatggcttaatgacttgggtgtgacaagtaattctgtcatagtcattctcctttaattgaaatcgctaatccatcgtctatatttaaaaaattcgttgtatatcctggttgctttattaaccactcattataatcttgaacctttttaaccatttgtcttacatttctcgatctaacaatcccaatatccgatacaaaaccgtgatataaaacattatctgtaattacgagaccttggtgctttaaaagtggtgtatatatttcaaaaaatttctttgattgcgcttttgctgcatcaataaatatcatatcataaactttgtcatttacattttcaaattgctctaaagcattaccttcaataattcgaacctggttttcaaaatgataagtagctaaattttgtttagcatattgaatcatcgtttcattacgctctatcgttgtgacatgaatgtcatcagatatagaagcgaattgcatagaactatagccgattgctgtaccaatttctaaaatatttttaacattattcatacgaattaattgcttaattaaatctaatgttaaacgatctacaattggcacttcatttacctcggcaaattcacgcaaaacttcgattgaactattttgatgttgatgtaaatctattaaatattttttatttaggtcatccatgttttaaacttcctttatgtaaaataagtcaatatgattatgacaataaaataaatcagccttcacaattgattataattttgccaaccaattaaatgactgatttcgtgttagacgcaaagctattttatttatagaagcgaatcattcatataaaatttaactttagatattttaccatattttcaataaaattataagcgttaattatttatacattgcttgacttaaaaaatactcttgcctccccatctttaaggttagcaagagtaaaatctttttaattattcttccatttcagtatttacaacttcttcaatcatgtcccattcttcatcagtttcgattggtactaacttaccaccgtcacctgactcatctggttcattgatcattggtacaagctcaatcatatcgtcttcatctgattgagcaccttcttcagctaagataacatactcttttttgaattcaggatgataaaattctaaaacttttcggtataaaacttcatttccctcttcatcgaataaagttaataattcttcttcgttattaatttctagttgtgaatcatgattatgttcagtcatagtaaaatctccttttaatgtagtgaatctaaatagccttgtaaaataaataccgctgccattttatcaatcacttgttttcttttttgtcttgaaacatctgcttctaataatgatcgttcagcagccattgtgcttaatctttcatcccacatcacaatctcaatagaaggataagcttctaataatttttctttatatgttaacgaagcttcgcctcgaaatcctattgaattattcatgtttttaggtagtcctattacgactgtacccacattatgttttttaataatgtctactaattggtcaatacctaattcattattttcttcattgattcggagtgtgtctaatccttgtgccgtccaacccattatatcactaattgcaattcctaccgttctactaccgacatcgagtcctaaaattttatgttgtaacataaattatttattttgctcttttaaatagtaagaaacaagctcttccataataacatctctatcaatatgacgaatttgatttcttgcttcattttggcgtggaatatacgcagggtcacctgataataaataacctacaatttggtttacggcattatatcctcgttcatctaatgttcgataaacattatttaaaacatctcttacatcttgcgttggaagttcttcatagtcgaatttcattgttttatcaaagttttccatttgcgacactcctttaattacaaatataactcactatcatcatacaatattatggctttaaattatagatttttaatgtaatctttaataaagcttaatgattttgagatattttcaggttgtgtaccgccaccttgagccatatctggacgaccgccacctttaccaccaacgattggtgccatttgtttgataagatcaccggctttaacgttatttgttaaagatttagggacagttgcaaccatcgatactttatcatcaacattacttgcaagaatgataattgtatcttgtagtttagatttaaaatcgtccattgtcgagcgaattgctttcgcatttggtacatccacttcagtaaccaatactttatagccattgatttcttcaacttgatcttcaatattacccattttaagtgatgtgatttctttgtcacgttgctctaattgttttaataatgctttttcttcatcttgtaattgtgttaacttatcgactacttgatcatcagatttcactttcagctgtgatttcatcgtattaaatttctcttgaatatcttctaaatataagaaagctgctttacctgttaatgcttcaatacgacgcacaccagctcctgtacctgactcacttactattttgaataagccaatttcagaagtattgcggacatgaataccaccacataattcaattgaaaatggtgccatatttactacacgcacaacatcaccatatttttcaccgaataatgccattgcgcccatttctttagctgaagcaatatccatttcttgaatgttaacgtcaatacctttccaaatttcttcatttactaagcgttcaacttgatcaatttcatcattagtcattggaccaaaatgagagaaatcaaaacgtaaacgatctgcttctactagtgaaccagcttggttaacatgatcacccagtactgatttcaacgctgcatgtaataaatgtgttgcactatggttcttttgaatgtcacgtcgatcattttggttcacttcagcagacactgtagcgccaacatttacttggccaaattgtactactcctttatgcaagttttgaccatttggtgctttggttacttcactaacagcaatttcaaaattgtcattataaacaatacctgtatccgcaacttgtccaccactgattgcataaaatggtgtttccgttaacatgaagtatactgtttcacccgcttcaacttgtgaaacttcttcaccattgtatatcaagtgtgttagtgttgtttgagctgtcgcagtatcataaccaacaaaagtacttgcagatgtaatatttttcaatacttcactttgaacttgcattgattgagaattttgacgtgcttgacgtgcacgatcacgttgttgttgcatttctgactcgaatgttgtcatatcaactttcaatcctgcttgcactgctatttcttcagttaattcaattgggaacccatacgtatcatacaatttaaatgcatctttcccattaatttcatttgttgtcgctttagcttttttaattaattcatttaaaatcgctaaaccatcttctaatgtttcatggaatcgttcttcttcagactttataacacgcttaatgaaatctgctttttccttaacatttggataatatggttccataatgtctgcaacaatatcaacaagtttgtacataaatggctcattgattcctaacgtttgactaaaacgaacggcacgacgtaacaatcgacgtaatacataccctctaccttcattggcaggtaatgcaccatcagaaattgcaaatgcaatcgtacgaatgtggtcagcaattactttaaatgccacatcttgttcgttgtttactaaatattgtttacctgatactttttcgatttcattcattataggcataaataaatctgtttcatagttagtacgtacattttgagaaactgaggccatacgctcaagccccatgccagtatcaatatttttattaggtaatggtgtgtaactatgatctttattatgattgaattcactaaatactaagttccatacttcaagatagcgttcattttctccacctggatacatttcttctgccggatcgtcttgtccatatgcttctccgcgatcatagaaaatctcagtgttcggtcctgaaggcccttcaccaatatcccagaagttaccttcaatgcgaataatacgactttcttcaagcccaatatctttatgccaaatgttgtatgcttccatatcttccggatgaatcgtaacgtacaatttatctggctccatacccatccatttatcactcgttaaaaattcccaagcaaattcaatcgcttcttgtttaaaataatcaccaattgagaagttacctaacatttcaaagaatgtatggtgacgcgctgtgaaaccaacattttcaatatcatttgtacgaatagctttttgagagtttacaattcttggctttttaggtgtttcacgtccatcaaaatatttctttaatgttgctacacctgaattaatccataataatgtatcatcatcaattggcactaatggtgcagaaggttcaaccatatgtcctttttcaacaaagaaatctagatatttttgtctaatttcactcgcttttaactttttcatcatttacacatcctatttactgtttttaaattaccattccataaaaattgatgacacagatagtcgatttgcaaaactagtataaatcaatatcattttttattattaaaaaataaaaaacgcccatcctcaaaagggacgaacgttatcgcggtaccaccctagttataaatgcaattcaacacatttatcactttaattcgactatacagttgtgcataaagtagcgttcactaatgtttgttgtacttttcaccaaccagtacatctctgataaacaaatcattaactactcatctttatacgaatttaattctattttagttacatttacgcttgttgtcaacgttctataaagtcatacggcgtgatttctcccatattaatcattgggtcaattttaaacattgtagcttccgttaatacatttgtatctgtttttgttgaatcagacataacttcttcactatcattcgatgacattggcgcttctacttgatcatctattgtcgtttgtgaagctcctgtatcattagttgctgtgttttccagcatttcttcatcttctgaattaaaataatttttcaacaatgtacataattgtgttaaacgcgcttgaccatttgttttcaatccaatatcaaatgcttccggatcaccaagtaaaactaaactcgttttcgctctagttaaaccagtatataatatcggtctttgtaacattctaaaatactgtttaacaataggcatgataacaataggaaattctgaaccttgtgatttatggattgatgtacaataagcatgtgttaattccatcatatcttgtttcgtaaatgtaatttcattaccttcaaaatccacaacaagtacatctttattaagggcattttctttcgcccaaaaaataccaacaataactcctatgtcaccattgaatatgttatcatttggcctattaacaagttgtaatactttgtcaccttttctaaagactacatcaccaaactcaatttctcgtgtgtctttctttttagggtttaaaatatcttgtaaaacttgatttaaacgtttaataccggcatttcctttatacattggtgcaagcacttgaatatcagccatagtataccctttattaacagcactagtaactaccttctcaacaactgttggtatttggtttgcctgacagttaataaaacttctatcatgaaaacgctgtgtaatatcaattttctgacccaacttcattcgatgtgctaattctataatgcttgaaccatcttgttgacgatatacttcagtcagatttactcgtggtatagctttcgattcaattaaatctttaaatacttgaccaggacctacagaaggcaattggtcctcatcacctacaaatatcaattgtgcatctaaaggaactgcacttaaaaattggtggaacaaccaagtatctaccatagacatctcatcaatgattatgagtcgtgcgtttatttcattttctaatatatcctctggctttgtgtcttgattccaacctattaaacgatgaatcgtcattgcttctaatccagttgactcttgtagtctcttagacgctcttcctgttggcgctgctaatacaactggataatcatcattgacataatcatcataatctaatgataagccatgaatctcagcatataattcaacaatacctttaattactgtcgtttttcctgttcccggtccaccggttaatagcatcaccttagaattgatagccgtttgcaaagcttctttttgtgaagctgcatagttcacttgattcgcatcttctatttcaccaatatgcatttgtaaatctgactgttcaatttctgtaagtttatttgtatgcgtctttattctgaataagttttgaacacttttgatttcagaataatacaaacttggaattgcaacttgttcattgtcaataattagtcgtttttcctcatttaagtattgcaacatttcgtctaatttttcaggttcgatgacctcttcatcttgataatttaatacatcaaccgttaaatctataacaacattgataggcaaatatgtatgtccctgtttaatacattcttcttctaacgtatagagcaacgcagcttttaatcgttcattatcgttataagcgataccaatatttctagcaagttgatctgctttattaaaaccaatacctttaatatcataaatcaattgatatggatttcgatctaaaatagtcagtgtatcgccgagataaaactgataaattgccattgaaagtttaggaccaaaccctaaatcatgtaaacgaatcattattttttcagattcttgatttgctgaaatttgttctgcaatttgtttctgtttctttttagataatcccgaaactttttctagcactgaatggtcatctaatatatcatttatcgcattgtcacctaatgtattaacaatattttgagctgtctttttacctacacctttaaacaaatcactagataaataacttataattgcttctttcgtttgtggcatttctttttcaaaagtctctgcttttaattgtttaccataacgtggatgatcaacaacttgccctttaaatgtgtagacatcgccttcaacaatattcggaagaaaccctacaacagttggcattgtatcaaagtcttcatttgtttcaatagtatctactttaagcactgtataaaaattatcactgttttgaaacaatatcgcttcaacagtacctttgatcattgaataatcaaatagtgtagggtctgacatgttactcctcctctttcattttagtgaatgttttcagcgcatgctgacttaataagtgtttagggtcgatagtcacagcttctttaaaatgagttattgcttcatcaatatcttcatttttcataaataacgctaagcccaaattgtatcttgcatcaacatgatttttatcaatcgttaatacatgtttaagttgagttatggcttcattaaacatttctaattgacataatacaagaccatattgaaattgaacttctgcatctttgtctttatctagttccgcagcagtcattaaatacggcaatgccagcttaaatgattctaactgattaaacgccataccgatcatataattacaatcaacttgttcaatctctgtttgtaatgcttgttgatataatttaatagcttcttgataacgttgctgattataatatacatttgctagattaaaaaatacgacgccattcttcggatctattgttaaagctttttggaaaaaacgctctgccttttcaatctcattcgcatcagcaagtacgataccagcattaatataattttcaataattgtaggattttcttcgatatttccgaacaatgcttgtaacgcttcttctatttttccattttgtatgtattgataaattgtttgttgatctatcatttacgaacctcatttctcatcaattataacatcttgataaattgtatgtctcgaatcacttaacaacgaataaaatataatctaatatcatcttcattcatgaaaaagcgggaatggaatagaaatgcttaagaaccattaacggtttattatgtaatggttcttccacattagccaccactattatgtacttaaaaataagaatacataattagattcatgcatagggagtgggacagaaatgatattttaacaaaattaaattcgttatccccaactggcattgcctgtagaatttctttacgaaattctctatgttgtggtcccgccaatataacattgtagagcctaggacattgtgatgtcccagactctatcctcatgaattattctcatcaaaaactgtctttcgtcattttcaacgttgaaacttcaaataagtaatttattgttgccattgtttatacaacataatttaattgaccttcatttttgaacacatcgtcaattgttgcaccaccaagacacacatcaccttgataaaaaacaactgcttgtccaggtgtgattgctcttactggctcagcaaaagtaacacgtagtgcatggtcgttttcacgtttcacaaaaactttcgtatctttttggcgatatctaaatttagctgtacattcaaaaccttgatctaagtcattatcttctggatttacaaatgaatagtctgaagcaattaagtaatcactgtataatgcatcgtgatggaatccttgttctacatataaaacattatcttttaggtttttaccgacaacaaaccaaggatcgccatctccacctatacctaatccatgtctttgtcctattgtgtaatacatcaaaccactatgtttacccattttcttaccatcaagtgttatcatatcacccggttgtgcaggtaaatattgtgataaaaatgttttaaagtttttttcgccgataaaacaaatgcctgtagaatcttttttcttagcagtaacaagtccttgttcttcagcaattcgacgcacttcactcttttcgatgtcgccaattgggaacatcacttttgaaagttgttgttgagataattgattcaagaagtatgtttgatctttattattatctacaccacgtaacatttcaacatgaccatcttcatgacgatgtatgcgtgcgtaatgtcctgttgctacataatctgcacctaaattcatcgcatgatctaaaaaggctttaaacttaatttctttattacacataacgtctggatttggagtacgaccttttttgtattcatctaagaaatacgtaaagactttatcccaatattctttttcaaaattaacagcgtaatacggaatgccaatttgattacacacttcaataacatcgttgtaatcttcagttgcagtacatacgccattttcgtcagtgtcatcccagtttttcataaatatgccaatgacatcataaccttgttcttttaagacgtgggctgttacagaactatctacaccgcctgacataccaacgacaacacgtatatctttatttgacaattatgactcctccttaaatttaaaatatattttatgaatttcagctacaattgcattaatttcattttcagtagtcaattcgttaaaactaaatcgaatcgaatgatttgatcgctcctcatcttcgaacattgcatctaaaacatgcgacggttgtgtagagcctgctgtacatgcagatccagacgacacatagatttgtgccatatccaacaatgttaacatcgtttcaacttcaacaaacggaaaatatagatttacaatatggcctgtagcatccgtcattgaaccatttaattcaaatggaatcgctctttcttgtaatttaactaaaaattgttcttttaaattcattaaatgaatattgttatcgtctcgattcttttctgctaattgtaatgctttagccatcccaacaatttgcgcaagattttcagtgcctgcacggcgtttcaattcttgttcaccgccaagttgaggataatctagtgtaacatggtctttaactagtaatgcaccgacaccttttggtccgccaaacttatgagcagtaatactcattgcgtcgatctcaaattcgtcaaacttaacatcaagatgtccaattgcttgaaccgcatcaacatggaaatatgcatttgtctcagcaataatatcttgaatatcataaatttgttgcactgtgccaacttcattatttacaaacataatagatactaaaatcgtcttatctgtaattgtttcttcaagttgatctaaatcaatagcacctgtatcatcaacatctagatatgttacatcaaaaccttctcgctctaattgttcaaaaacatgtaacacagaatgatgttcaatcttcgatgtgataatgtgattacccaattgttcatttgcttttactatgcctttaattgccgtattattcgattctgttgcgccactcgtaaatataatttcatgtgtatctgcaccaagtaattgtgcaatttgacgtcttgactcatctaaatatttacgcgcatctcttcccttagcatgtattgatgatggattaccataatgcgaattgtaaatcgtcatcatcgcatctactacttcaggttttactggtgtggtcgcagcataatctgcataaatttccatgtttggacactcctcacaattttatcaatgttccaataatagcaccttacatactatttttctacttttctgtttaactttatttataatgtttttaattatattttaccattttctacacatgcttttcgataggcttttttaagtttatcgctttattcttgtcttttttataaattttagtatttgcagatatttttttatttgtaaaatgtaacgtactattattttggttatgagcaatttaatatttatctggttattcgattggtatacttcttatatcataaaaaaggaaggacgatataaaaatggcgattaaatattcagcattaaaccttgtccctattcgagaaggtgaagatgaacaaacagcaattaatgatatggttaatctcgcacaacatttagacgaattatcatatgaaagatattggattgctgaacaccataacgctcccaacctagtaagttcagcaactgctttattaattcaacatacgttagaacatacgaaacacatacgtgtaggttctggaggcatcatgttacctaatcatgctccattaatcgttgcggaacaatttggcacgatggcaacattatttccaaatcgtgtcgatttaggattaggacgtgcacctggaacagatatgatgaccgcaagtgcattaagacgagatcaacatgatggtgtttataaatttccagaagaggtttcattattacaacaatatttcggccctgctcaccaacaagcatatgttcgtgcttatccagcagtaggtaaaaatgtgcctttatacattcttggttcttcaacagattctgcacatttagctgctcgcaaagggcttccatatgtgttcgctggacattttgcacctcaacaaatgaaagaagctatcgaaatttacaaaacgttatttgaaccttctgatgtattagacgaaccttatgttattgtatgtttaaatacaatcgttgctgaaaatgatgacgaagcacaatatttagcttcatctatggcacaagtaatggttagtatcactcgtggcagaatgcagcccgttcaaccgccaacacatgaactacaaaatatattaacgccgagagaatacgcgatggctatggaaagacagaaaatatcattaataggttcagaaaatactgttcaacaaaaaattcaagattttatggaaacttatggtgaagtcaacgaaattatggcaataagttatatttatgataaagatatgcaattagactcttatcgtcggttcaagaatgttataaatcagataaatgaaaaaaacactttataatgtgataaataaactaagtgaaagtatgtatccataatattaataaaaatatacagtaacagcattttgaatgaaagatgtctttattgttcaatcatttattttagtaatgattcaaattcacttaaaattctaatgcaaatatgaaagcgccccttcaactttacactgtgtaagtgtttatttgatggggcgctttcaaaatattgaaaagcatatccaaaatttaaagaaatttatttctctttatcttcattttcttttttctcttcgttattcgatcctgtatattcatttatcttatcttttacatttttaacttgttcattatcgctatttttaaatttttctactgcgtctttagctttatccataaaactcatattaatcgctcctcttatatttgattagtttaattgaacttattttttaagtttatcaattgcatcagttattttgtttttagcattttcaacaacttcttttgctttaccaatcactttatcttgctgaccttctttttctaattctttgttatcagtaacgttacctactgtttctttaacatttcctttaaattgatcgaacttactttcgtctgccatagtgaaacctccttggatgtatatatttatataccactaaggaggttcgctaaacattataatatgaagtttttatgttatagtatagtatttatacgattaaatataaaacatgtatccgtctaaatcttcacttgtatctacatattccgctaaatatttcaatgttgtattatctaaaacatctctcactgcatctctcatgcgaatccatagttgtttttgcgcaggtggttctgattcaatactttcaacaaatgtaattggaccttctaacagtcttataatatcccctgctgagatttcttccgctggcactcttaattggtatccacctttagcaccgcgtacacttcgaattaaccccgcatttcttaaaggacctacaagctgttctaaatataaatcactcaaattattttcttcagcaattgactttaatgatatacatccttgcccctcttttttagcaagagaaatcatcaatgtaagtccatatctccctttagtagaaattttcattgtataacctcacttaattcgaatattgatattcccattttagcattttttgagttaagatagtataagaaaggtgtgacaaatgtgagtacagaaccattagcatcgagaatgcgcccaaaaaatatagatgaaatcatttcccaacaacatttagttggaccaagaggcattatcagaagaatggttgatacaaaaaaattaacttcaatgattttttatggtccacctggtataggcaaaacaagtattgccaaagcaatttcgggcagtacgcaatataaattcagacaattgaatgctgtaactaacactaaaaaagatatgcaacttgttgttgaagaagctaaaatgtctggtcaagttatcttgttattagatgaaatacatcgactagataaagctaaacaagactttttattacctcatttagaaaatggcaaaatcgtcttgatcggtgctacaacttcaaatccttatcatgctatcaatccagcgattcgttcaagagcgcaaattttcgagttatatcctttaaatgacgaagatgtgcgccaagcgttaactcgtgcaatagaagatgatgagaatggtttgaaaacatatcaacccaaaattgatgaagatgccatgacctacttttctacacaaagccaaggtgatgttcgtagtgcgttaaatgcattggaattagctgtattaagcgcagataatgacaaagacggttatcgacatgttacattgcaagatgctaaagactgtttacaaaaaggtgcatttgtaagtgacaaggatggtgacatgcattacgatgttatgagcgctttccaaaaatctatccgtggtagcgacgtcaatgccgctttacattatttagcacgattaattgaagctggagatttacctacaatagttcgacgattacttgtaattagctatgaggatataggcttagcctcacctaatgctggtcagagaacacttgctgctattgaatcaacagaacgtctaggtttaccagaagctagaattccactaagccaagcagtaatcgaactatgcttatcacctaagtcaaattcagcaatgagtgccattgatagtgcattgtccgatattagaaacggtcatgtgggccaaattccaaaccatttaaaagatggacattatcaaggtgctaaagatctaggccgatctattggttacaaatatccacaccaatatgttaatggctatgtttcacagcaatatttacctgataaactaaaaaacaaaatttattacgaaccaaaaacgacatctaaaagtgaacaacaactcaaagaaatatataacaacttacttaaacaaaggccgtaaaaataagattaaatcgattacctttgatattttagctataatcaaatcaaaactgactagtacacgaggcatattctactatgcttgcgaactagtcagttttagttttatggtgtggttacacttgccttacgttgaaaattatccctttcaaaatgaattattgccctttgtctttaatgcgacgaactggaatatcttttaatacgtcattcaccacataacttgcacaaattaatccaacaacacttggcacaaaggcatttgaagaaggtggcatttgtccttttcgattgatagcatttttatctccaactatatcttttacatcttctcttatgacaattggactttcatctgaaaatacaactggaatccctttacgaattcctagttttttcaatttttgacgaataattttggccattggatcggtatgtgttttagagatatctgaaattgtaaaacgtgttggatctgttttatttgcagcacccatactggaaatcactttaatccctcggtcaagacactctttcattaagtgtactttgtacattattgtatcacttgcatctacaaaataatctatatcgtagttatcgaaaatttcttcatatgtctcttctgtataaaacatatgtaagggcgtgactttacaatctggattaattaatttaatacgttcttccatcaaagaaactttactttgtcctaccgttgtagttaaagcgtgtaattgtctgtttacatttgtaatatcaacatcatctttatctattaatataatatgaccaatattcgttcttgctaatgcttcagcagcaaatgaaccaacacctccaacgccaagtatgacaacagtttgttgcttcaataaatctaaaccttgttgtccaatcgctagttcatttcttgaaaattgatgtttcattattttacctctttcactgatttatacataagtacatagtaacttaaaattttatatttagcattatcactttgattattttcccaaaattcaacgaggaaacatttattaaacgctataaaacccaactaattctttattaaaaacttaaagaaacgcataaaaatacgcaagacaaagtcttgcgtatcgatagagtccgtattgccgtagttataatagcttgatcattcggcctgttatatacaggtgggtgccctgtttcttgttttgtacgtccttcatataaggcgtgtacgctgcaagaaaacccattgggctcccttgatcaaagagtgttaggcccaaattaaaaagcaaacttacgaacaactcagatgactatcttatgatgttatattaccacataattaaaattaatgaaattataacaaaccaaagtttattgattttttaaaatttagtgacgaattcgcaaagaaagttcttctaattgtttatcagaaacttcaccaggcgcattcgttaataaacatgtagcagatgctgttttagggaatgcgattgtatctctcaagtttgttctattagtcaataacatgactaatcggtctaatcctaatgcaataccgccatgtggtggtgcaccatatttaaatgcatctagtaagaagccgaactgttcttgtgcttgttctttagtaaatccaagaacttcgaacattttttcttgtaactcaccatcatgaattctgattgaaccgccacctaattcataaccatttaatactatgtcataagcatttgcctcagcttcttctggcgcagtgccaagcttagcaatatcagcttcttttggagatgtaaatggatgatgtgctgcaacgtaacgtttcgcatcttcatcatattctaataatggccaatctgtcacccataagaagtttaattttgtttcatcgattaaacctaattctttagctaatttgacacgtaatgcacctaaactttgtgcaacgacatttggtttgtctgcaacaaacattactaagtcaccagcttcagcaccagttaatgtaagtaatgtttcaacattttctgtttcaaagaaacgtccaattggacctgtcaaaccatcttccacaactttaacccacgctaatcctttagcaccatagatgtttacaaattctgttaaagcatccatatctttacgagtatattgttcagctgcacctttagcgacaattgctttaatttcaccatcattttcaacagtatctttaaatactttaaagtccatatcacgtcctaattgagaaacgtcaattaattccatttcaaaacgtgtatctggtttatcagaaccatagcgacgcatcgcttctttatatgtcatgcgtgggaaagcgccattaatttcaacgcctttaacttctttaacaacttttttaagcatttcttcacccatttgcatcacatcttcttggtctacaaaactcatttcaatatcgacttgtgtaaattcaggttgacgatctgcacgtaaatcttcgtcacggaagcattttacgatttggtagtatttgtcaaatccactaatcatcaataattgcttaaataattgtggtgattgtggtaatgcataaaattcaccatcatgaacacgagatggtactaaatagtcacgtgcaccctcaggtgttgacttcgttagtactggtgtttcgatgtcaaagaacccttcatcatccaaatattgacgaatagaacgtgtaatttgatgtctcattttaaatgtttgcgctaactcttgacgacgtaaatctaaataacggtattttaatcgaatattttcatcaacgttaacattttcttcatttatagaaaatggtggtgtctcagatttattaatcactttaatatttgtaacttgtacttcaacttggccagttttaattttaggattaactgtttcagggtcacgcttcgtaactgtaccttgaacttctacaacatattcagaacgtactgtttcagcaattttcaatgcctcttctgaaaatgcaggattaaacacgacttgtacaattccttctctatctcttaaatcaacgaaaatcaatccaccaaggtcacgacgattgttaacccatccttttaatgtaatttcttgtcctaaaaatgcctcagtaactaatccacaataagttgttctcttactcatattttaacgccctctctacttcttaaaatattcgactaatgcgtctaattcaattgtttcagattcaccagttgtcatatttttaacatcgattttattattttctaattcttgatcaccaataacgattgtaaacttggcacctaaacggtctgcttgtttcatttgtcctttaattttacgctgtaaatagtctttatctgctttaataccattatgtctcaaatgatttaatagcttcacagcatatcgatctgcttgatcacccattgtaacaatgaataaatctaagttttcttcaatatctaattcgataccttcttcttcaagtgcaagcaataatcgttctatacttagcgcaaaaccaatacctgtttcacttggaccatctagcaattctaataaaccattataacggccaccaccacaaagcgttgtaatggcaccatcatagttagggttatccatcattaattcaaatgctgtatgtgtataataatccaatccacgaactaagttaggatcttcaatatatggaatacctaaatcatctaaataagcttttacttgttcataatatgccttagattcctcatttaagaaatcagtgattctaggtgcagtcttaatcgcttctttatcacggtctactttacaatccaaaattcgcatcggatttgtatgcaaacgtgattgacaatctgaacaaaattcatgaattactggttcaaagtgtttcactaacgcttcgttatattcttttcgagacgccatatcccctacactattaataacaagctttaaatgttttaatccaaatgattgataaatatgcataaccatagctaatacttctgcatctacgctaggattttcagcaccaatagcttctacaccaaattgattaaattgacgatagcgtcctttttgcttacgttcatatctaaacatcggtccattgtaataaagtttaattggttggtttggattaccttgcattttatgttcaatatatgaacgcacaactgcagctgttccctcaggtcttaatgtaatacttctatcgcctttatctttaaatgtatacatttctttttgtacgacatcggttgaatcaccaacacctcttgcaaaaagatctgtactttcaaaaattggtgttcttatttctttataattataaaatgtcattaattcatctaattgattttcaatgtaacgccatttctttgaatcttcaggtaaaatatcctgcgtccctctaggtattttaatcattttgacatctccctcggcaaactattttatttaattacctttttaaaactaaaactatatacgaccacttaactttgcacgataaatcataatcttaaaagcaaaagaaaaagcccttgcacagcctgaaactgcacaagggacgaatatccgtgttgccaccctcattggtttaaaaaacatgcctaattgtaatcatcattactttttataagcgtgcatttaataaacccactcaaaacgtttaacgtacgtttaacggctttacttttcataaagcacctcttcttgtgttcaatgtatataaactactcagcataatctttcagtctatggattatattcctacacaatcttagttagattgctacctatttcatttaccatttcaagaatactaacggttttagttataaaattcaatatcaatgataactactttcacatatttttgcaagccctacgcagaaaaataaattttaaggccatcaacaattgcttgttctaaaatttgtctatgtaattgatctttaatcatcgtttcatcagttgggttactaatataacctaattctaataaaacagcaggaacttttgtttgtcttaacacttgataattttcttgtcttgaaccgcgattagaaagtagacctttcttctgaatcgtagcgtctaacgtatctgctaaagctctttgattatcatgataccaataaactgtcattccatttgcattagatgattctaacgcatcattatgtatactcaaataggcatcgcctttgatatcacgattttctagtgaaacatatgtatcgtctgttcttgtcatcttaacagttgcgccttctttttctaaagtacgctgcaattcttttgctgttttcaacgtataatctttttctaaacttttatatttagtattgcttgaagcaccctggtcactacctccatgaccaggatcaagcactattgttttaccttgcaaaggatttttctccttcgtattatccgcgacaatatctaaatttgtgtgccatccagctatccaacctttttcattactggatgtatcttcaacttcaatccatttacctactttaccaatctttttaaaatggtcacctttttcaactttatatatgactggatacgcagcgtttggacttggacgtaattcagcattttcagttatcgtgatgttcccactatcttcactattgctattcagcaataaaaataaaaagatgataaataagacaaaggcaatcactactattagagtacgtttatttttaagaccctttttagataaccatgcctctatttttttcattgaattttgccgtcctgactttcataaataatagtgactggaccatcattatttatgctaacattcatgtgtgttccaaattcacctgttttcacagtaagaccatacgctcgtagcgcatcattaaaatactcataaatttttaccgcttgatcaggatttttagaatttgagaaacctggacggttacctttttttacatctgcatagagagtaaattgtgaaactgatagtatttcaccattcatttgttggatattaaagtttaatttattattgtcatcttcaaataatcttgcattagcaattttctttgcaattacatctgcatcttgctctgtagagttctgaccgataccgactaataaacaatatccttttttgatttgattatttaatgtatcattcgtcaccgatgcttctttaactctttgtacaactactttcatattttgcacctctagttccaaactcttgttactgtataaacatcaccaagttgtttgatcttttctaccacacgataaacatcattcacgtttttcaccatgacactaatatttattattgcatttttatcaatatctgaacgtcctgaaactttaattaaattgccggctgtcgagctaacagcttgtagtacttcattcaacaagccatttcggtcatacgcagttacctctaaatcaacctgatatttttgagttgcgtcttttgattttacccattcaacattaattagtcgttcagtttcgttcttaatatttgggcaatcagtgcgatgtactttaataccgtgacctttggtgatataacctacaatatcatcacctggtataggattacaacattttgacaacttgataagtacattttctaaaccttctacatagacaccactatcagtaatgatgttgtctttaataggcaatgatttcgtaacttcttgtgcttcatttaaagcacgttgtttatctaaaatacgttgtctttcagttaatttattaacaatctgtaaggatgtcacgccgccaaatcctacagctgcgaataaatcatcttcatttgcaaagttatatttttcattaacaacctgaatatttttctctgtcaaaatatcttcgactctaaatccttgctcttttatttcagcttcaaccatcattcggcctttttcaatattagatgaacgatcttgttttttgaagaaacttttaattttacctttgacactagacgatttaacaattttcaaccaatcacgacttggtccatatgaatgtttactagtacgtatttcaacaatatcgcctgtttgtaaaatatagtcaattggtacaattttgccattcaccttggcaccaatcatcttattacctacttcactgtgaatcgcataagcaaaatcaatcggcacagcaccatatggcaactcaataacatcactcgctggggtaaatgcgtatactttgtcactctgtaagtcatattttaaggtttccataaattcttgagcgtcagacgatgtatgatccgcttcagctaattcttttaaccaatttaacttattttgataagtttgatctttttcacttacttttttaccttctttgtaagcccagtgtgctgcaacaccatgctcagcaatttcgtgcatatcaaacgttcgtatttggatttcgagcgggtctccatttgggcctactactgtagtatgcaatgactgatacaaattttgtttaggcattgcaatataatctttaaaacgtcctggcatcggtttccataacgtatgcaccaacccaagtatcgcataacaatcattaatagaattgacaataacacgtatcgccaacaaatcaaaaatttgatcaaattgttttttctgcttcatcattttccgataaatactgtaaatatgtttaggtctaccatttatatcgccttcgatattcattcggtccatttcagtacgtattctatcaatagccgtttcgatatacgcttcacgttcactacgtttcttcttcattaaattgactattctaaaatattgcacattatcaatataacgaagagccgtatcttctagttcccatttgattgtattaataccaagacgatgtgctaatggtgcataaatttctaatgtttctcgagaaattctaatttgtttttcgcgcggcatggctttcaaggtacgcatattatgtaatctgtctgctaatttcaccaaaattacgcgtacatctttggcaatcgcaataaataacttgcgatgattttcagcttgttgttcttcttttgagcggtattttacttttttaagcttcgtcacaccatcaacaattcgagcaacttcttcattgaacatttcttttacatcttcaaatgtatacggtgtatcttcaattacatcatgcaaaaaacctgcgacaatcgtcggtccgtctaatcgcatttctgttaaaatacctgcaacttgtataggatgcataatgtatggtaatccgttttttcggaactgacctttatgtgcttcataagcaatatgatagctttttaaaacatactcatattcatctgctgacaaatatgattttgctttgtgaagaacttcgtctgcactatatggatattcgttgttcattatatgatacaccccattcatatttattacttcgccttaaacaatgatttaggtactcttgttgaatagtatttgtcccacaccaatcatacgtccgtcgacgataaatatttatcctgtcgtcattaatcgtaatattaattttacttgagcgagtttaatttgtatactattcctacttttaaaacttttacaaaaattcgacctaaatctactgtttcattttttaaatattagttctatgatactacaatttatgaaataaataaacgatgttattaaggtataatgctcaatcatctaacattttcagtaaatcaaaaccacccgtgtgaacgggtggtttgttctgcggctataagccttccttactggccagccctaaaagggcactgacaagtcagccaactgcactactattccagcaaccctaaagggttactcttttttctttctttttttatttttctctccagtgaaaggatctaaatattcttccattgagatttggtctgcaacgatatcctcttgtaattgattacgaatataattttcaatcacttttttatttctacctactgtatccacataaaatcctttacaccaaaactttctatttccatatctatactttaagttagcatgtctatcaaatatcattaaactactttttccttttaaatagccaacaaatgatgataccccaagtttgggtggtatactaactaacatatggatatgatctttacatgcctctgcttcaattatctctacaccttttctttcacataattgacgcaatataatccctatatctttttttatttttccatatatcacttgtcttctgtatttaggtgcaaagacaatatgatacttacaattccattttgtatgtgctaaactgtttgtgtcagatgacattaaatagcatctcctcgtgttgattattttggttggctgaccaatatttattctagcacgtagagatgcattttttgtgacaatggtagaaccttttctgaaccatacgcatagcgtatggttttctttttacaataaaaaatcctaacatctcatgttaagaaaacttaaacaacttttttaattaagtcattggttcttatacatttgatgaaggatttcatttgataaaattatattatttattattcgtcgtatgagattaaactcataacatcgtaatctttaattttttcaataccatttaaatatttcaattcaattataaatgcaatacctactacgataccgcctaatttttcaactaattttattgctgcttcaatcgtaccaccagtagctaataaatcatctgtaattaacacacgttgacctggtttaattgcatctttgtgcattgttaaaacatttgtaccatattctaggtcatactcataacgaatgacttcacgaggtaatttcccttcttttctaacaggtgcaaagccaatccccattgaataagctacaggacagccaatgataaagccacgcgcttcaggtcctacaacgatatcaacatctctgtcttttgcgtattctacaattttatctgttgcatagccatatgcttcaccattatccataattgtagtaatatccttgaaactaacacctggtttcggccaatcttgaacttctgatacgtattgctttaaatccattaatatttcctcctaaattgctcacgacaattgtgactttatccaattttttatttctgaaaaatcttgatataataattgcttttcaacatccatacgttgttgtcttaattgatatactttgctggaatcaatcgatcttttatcaggttgttgattgattcgaattaaaccatcttcttgtgttacaaattttaagtctaagaaaactttcaacatgaatttaagtgtatctggtttcacacttaaatgttgacacaataacataccctctttctggatatttgtttcttgtttagttattaatgctttataacactttttaaaaatatccatattaggtataccatcgaagtaaatcgaatgattatgttgcaaaactatataaagttgagaaaattgcagttgttgcaaggaattagacaagtcttccatagacgttggtaaatctcttaatactactttatcagtttgttgtttaatttcttcaccataataatattcattcgcatttactttatcacttttaggatgaataagcacgacaatattttcatcattttctgtaaaaggtaaactttttcgcttacttctataatctaatatttgctgttcattcatcgcaatatcttgaataattatttgcggtgattgattaccattccattcgttgatttgaacagatcctaatatattaattggctgttcatcttgtaactcaggttctaagtgtccattttgccaaaatagcgcggcgatattactttcaccaagtgtcaattttagatgatttttttgttgacctatcgccttaactgaagaaactgataaatcatccatttcaaaaataggtctagaaaaatctgttccgaagggtcttaaacgattcatatcacgaatatttttaatcgttatatcattttctgttaataatacatctacttgctttacgggatctaacgaagttgttttagataattctttcatccatttatttaaaccttcagctaacgattctatattttcaatatccatcgtcatacctgcagccatatgatggccgccaaatttagcgattaactcttgatgtgctgatagtatttcaaacatcgacacttgatcaattgatctggcggagccttttgcatgattttgctccctatcaatatttaaaattaatgttggcaaagcaaatgtttcgacaattttcgaagcaacaatacctaagacaccttcatgccaattttcttttgctaaaagtaaaaataaatctccctttttaactttcgtttctgccatagccattgcttcttctgtgatagttgctacaatatcttttctttcacggttaaaatgttcaacttgttctgctaaaaatgcagcttcttcttcgacgtcagtcatcaacaattcgcaagctaatgatgcgtcatctaaacgacctacagcattaagtctaggtccaataataaaaccaattgtttcttcatcaatattgtcattgtatcccgcttcttttagcaatgctttaacagaggtcggacattgatcatttaagacttttaatccttgtttcactaatgatcgattttcatcagttaaggatactaaatccgcaatggtacctatcgcaactaatgctttaaaataatcaggtacattttcaatcaatgcttgtgctaatttgtatgcaacacctgcaccacacaattgttggaacggataattaaacgatggatgcattggatgtacgattgcatatgcttctggtaatgtactaccaatttcatgatgatcagttacaatgacatcaactcctaaatcttgaaccattttaatttcattatgaccttgtatgccattatcaacagttatgattaatgttatgccttcatcatgagcatttctaaatgctagttcgtttggtccatatccttcggtaaagcggttaggaatatgccatcctacttgtgcacctaaaagttgtaatgttatcactaaaattgtagttgcggtaacaccgtcggcatcgtaatcaccataaactaggattttctcatcattcgctatcgctcttttaattctttcaatagtcttagtcatatcgctcaattgcagtgcatcatgattgatatctgtatctgaaatgatggattctattgcttgttcatcaataatcgatttactttctaatattttttttacgattggcgttaactttaattttgatgttaattcatcacttatgtattcagctggtttagttaatttccacttatacttcggtttaatcatatatatttacgcctcatttccaaaagacattatatctaaaattactttaaataaaaagcacttatctaaataatcaagactttaattataccattttttaaaaatgaatgcgggaacttatttatatatattttgttaaatttaaataaagtaaaaagcggtatgtgaactctttattgtttcacataccgcttaattcattttaaactaaaatcttttcatcgttcgatttcttttctttatatacaactaatttgtgtttcggcgattttttcaactgacgttttttcattattccccatagcggaacggcaatgaagattgaagagaatacaccagaaatcaatccgataaataatgctaaagtaaagttgaatatcgtaggagcaccgaagaatagtatagcaactactactacaataactgttaatactgtattaattgaacgtgtcattgtctgtctaattgatctattaacgatatcatcaatttgttctgttgtcgtaatcactttaaccttttgtaagttttcacgtacacggtcaaacgttacgattgtatcattaattgaataaccgacaattgttaatacagcggcgataaatgttaaatctacttcaattctaaataaactgaaaatcgctactataatgaatacatcatgtaataatgccaatacagatgaaagacccatgcgccattcaaatcgtaatgatacatagatgatgatacctatcgatgcatagattaatgcaagcattgcattttttgctaattcctgtccaataattggtgatacagtgttaatttgaggtgtgtcaccgaatttcgatttaatattatcactcaatttattatcttgagcacgcgttaaatcgtctttaaattgaacagttgctactttattgtctttaccattgatctgaatttgatccgctttaagtccactatcttttacaacttgctctaccttttgttgagtaattgcttgtttagattggaaatctacgcgtgtaccacttgagaaatcaattcctaagtttaacttgaagatataaagaataactaaaccgacaactacaattaaaatacttactccaattaatggcttagctaatttaacaaaattccatttctcgaatgaagttttaaggtcatgaacatctacaccttcattaatatcatgtcgtttattctttttaacaccaaataaccaaaattgatttttgaatatatttgatgaaacaagtaatgataataagaatcttgataagaacacggctgtaacaaagatcattagaatacctaataataacattgtcgcgaaacctttaactgaactttcaccgaagaagaataatactgctgcggcgataactgttgttaagttagaatcaaaaattgttaggaatgaacttttgtttgctttagaaaaggcttgctttatcgttctacctattcgaagttcatccttaatacgctcatacatgataatattggcatctacagccatacctacacctaataccaacgccgctaatcctggtaaagttagaaccccggaaatgaaattaaatgctactaacgttagatagatataagttgtcaatgcaataatcgctactaaaccaggtaatcggtagaatccaagcatgaataaataaattaatgctacaccaataaacgatgcaaacacagttttatctaatgcatcttgaccaaattgggcacctactgagtttgaataaatttctttcaagtcaactggtaaagaacctgcatttaacaattcggcgatttgttttgcttttttaacgccttcttgtcctttaaatccacccgagatttctacgctatcagaattgattggttgatcaacacttgctgcagaaataaatttagggtttttcttttgtgcttcttttttatagctgtcaccttttttgaaatctaaccaaacaaccatgacattatcacgtttcttagagatttcttccgttacttttttaaatttgtttttgtcttttactttaaaagtaactgtaggctggtttgtttcctgtttaaattcttgtttggcagatccctgtttaatatcagaaccgcttaattttactttatcttctgcatcgcgaattgttaaattagcttgagaagataaaattttacgtgcttcattctggtctgttacaccagcaagttgtactctaattctattaggttcttcaacttgaattttaggttccgaaacacctaaaacgttaacacgattttctaatgtttgcgctgttgattgtaaggcttttttatctattttgtcgcctttatttaaaggatcgacttgataaagcacctcaaatccaccttgcaaatcaagtcctaaattgacattctttataacacttttataagttgcagccattccggcaaacaacaatacgactaaaagcaagaacgcaattattctactacttttcttcacatgaacacctcattatttacgtatgtatttagaatacttgaatactattttataacgcaagttaaatctttcttacaaaatttattagccttatacatattaacatactagagcagggagtaaaaatagtcatagatatatttaatttaaatttaacaattattatgtatcacaatttctttttttggaataaaaataagctattctacatactacttataacttaaaaaggatgaaacgctattcgtttcatcctttttaataccacttctcattatgaagggtcaacttgtttaatagcaggtttttcgaaagttaattcagtaccatgaccattaactgtaataacaacagttgtttcatctactgctttaacagtacctttaataccaccaatagttgtaattctttgaccagattgaatgttattaatcaactcacgatgctgtttcgcacgtttttgttgtggtctgatcatcaagaaatacataaccgcaaaaattacgactatatatattagtaatgaaaattgcattttatacgctcctcttgcttaaaagttttttgggttctcaacatttaatccatattgctcgaagaattcttctttgaaatctaaaagacgatcttctcgaatggcttgtcttatatcttccattaattttagcagaaaatgtaaattatgaatagtagtaagacgaataccaaaagtttcctctgccttgattaaatgacgtatatacgctcttgaatagttttgacatgtataacagtcacaattctcatctaacggtcttaaatcatctgcaaattttgcatttttaataactaaacgaccttgcgatgtcatacaagtaccatttctggcaatacgtgtcggtaagacacaatcaaacatatccatgccgcgaatactacattcgattaacgcatctggagatcctacacccattaaatatcttggtttatctttaggcataaactgctctgtatgttcaaccattttatacataaccggtttaggttcaccaactgacaaaccgccgattgcataaccaggaaaatctaattctactaaatcctttgcactttgttctcttaaatcttcatattcgccaccttgtataatgccgaacaatgcttgatcttcaggtctttggtgtgcatctagacatcttttcgcccaacgtgttgtacgttcaatagatttttttacataatcatattcagcaggcatcggtggacattcatcaaatgccatcataatatcagatcctaaatcattttgaatttgcattgatttctcaggactcaaaaataatttagacccattagtatgatgtctaaattccacgccttcttctgtaattttacgtaaattacttaaactaaacacttggaaaccgcctgaatctgtaagaatcggaccatcccaattcatgaatttatgtaatcccccagcgtgtttgataatatcatttccgggttgtaaccacaaatgatatgtgttgcccaaaatgatttttgcttcaatttgtcttaactcttctggactcattgttttaacggttgctttagtaccaactggcataaacataggtgtttcaaatgaaccgtgtggtgtgtgcacgatacctaaacgcgcacctgattgtttacaagttttaatgtgttcgtatgttactgcaggcatattcaaaatcctcacattctttttatataattaacattgcatcgccaaaactaaagaatctatattctaaatttactgccgttttataagcattcagaacattttcacgactactaaacgctgatactagcataactaatgttgattttggtaaatgaaaattagtaatctggccatcaattgctttaaaatcaaatcctggataagtaaatatattagtccagccactcgtttcaacaaatttatcatgatcgcgtcgaattgtttcaagtgtacgtgttgaagttgtaccaactgatataatgcgatgtcctttggacttagtatcatttaataaatcagctgtttcttgtgtcatttgataatattcactatgcatttcgtggtcattcacatcgtctacgctcaccggtctaaacgtacctaacccaacatgtaatgtaacaaatgcgatattaacacctttatttttaatttcaattaataactcatcagtaaaatgtaatcctgctgttggtgctgccgctgaaccactttctttagcgtaaactgtttgataacgatctggatcatctaaacgttctttgatgtatggtggcagtggcatttcccctaattcatctaatctttcttgtaaaataccttcataatgtaaacgcatgatgcgtccaccttgatccatttcttttatgcattcagctataattttgccattaccaaaattcaatttattaccaactttaatacgcttagctggtttcagtaagacttcccaatcattaccttcaatttgagttaacattaacatttcaacttttgcaccagtttcttcttttaaaccaaaaagtctagctggcattactcgcgtatcgttaagcactaatgtatcaccaggtctaaaatactcaatgatatctttgaaatgtaaatgtttcatttcaccagtttctctatccatgactaataaacgactatgatcacgatcttttaaaggcgtttgagcaattaatgattctggtaagtcatagtcaaattcttcaatattcacgttattctctctcctcattcgactttgcaaaatgttcataagctaatggtgttgcttttctgccacgtggcgtacgttctaaaaagcctttctgaataagaaatggctcataaacgtcctcaattgtaatacgttcttcaccaattgttacggcaatcgtatctaaaccaacaggtccgccattatactgcttaataatacagttcatcattttatgatcaatgtaatctagtccgtgttgatcaacttgaagtaaacctaatgcgtgcttcgttgtttcaatgtatatttgttcatcttcattcacttgctggaagtctcttacccgcttcaatagtcgatttgctactcttggagtccctctagaacgtttagcaagttcaatggcactttcttcatcaatacctgtgcctaaaacctcagctgttctaataatgatttcttttaaatctgattcgttataatattctaatcttaagtgcacaccaaatcgatcccttagtggacctgttaagctgccagctcgcgttgttgcacctaccaaagtgaatggaggtaagtcgatacggatacttctagcctcatcgcctttaccaatgataatatctaaaaagaaatcttccattgcagggtataacacttcttcaacaacactactcagtctgtgtatttcatcaataaacaaaacatctccaggttgaagtcctgataaaattgcagccaaatcaccaggtctttctaatgaaggccctgatactgtacgtatattaacttccatttcattggcaatgatattagataatgttgtcttacctaatccaggggggccaaaaagcaatacatgatctaatggttcatgacgaagtttagccgctttaataaatacttctaaattactttttattgaattttgaccaatatattgtcgtaatctcgtaggtctaagcgacaattcgaaatcagtttcttcactatgcattgattgatcaaccatacgctcattcatgacaacacttcccctattaatctatttaaaattaagatacaactaattgaagacctgccttaacagcttcatcaactgagtcatatttatttttatttaacgttttctcaacttttgcaagctctcgtttagaataacctaatgcttctaacgctaacattgcttcttgcacgaattgatcttgcaccgtcgaagtagcgtctacttgtaataatgaatcgctatcttcttcagtaattttcactttaccttttaaatctaagacaatctgtcttgccgttttcttaccaattcctgggaatttagttaaatacgtatcattttcattttcaatggcacgttttacttcattaggcgtacttgtcgctaaaatagctaaagctgatttcggaccaataccagtaactttaattaaactcaagaacatatctttctcttcttcactactaaatccatacaataattgtgcatcttcacgaacaattaaagatgtatgaattaaaacttcatgatctagatgcttttgaaaacgataagaatttggtgtttgaatttcataaccaacaccagcagtttcaacaactacgtgtgtaggatataaatgtgttaacttacctttgacatacgcgtacattataggcacatccttacatactcatactaattaattctacttttgatacataatctaaatttctcaaagcgccaataacatcttctactgaagtttctttagatttagcattcagtgataatgttattgttgctttttcttccattggaatactttgatgaatcgttaatacagatagttctaactttgatataacatctagtacacgtgccaacataccaacaatatcagttacatataaaattaatgtaaattctcgatggtcaagcattttatcgtctactggaaatatcgtttctctatatttataaaaagcacttctagatagatcaaactgtttaacggcatcataaatggacaatgtcggatcactttttaaggcatctttaatcttcaatgttttaaccacggattcaggcaagacatcttctctaattaaataaaactttttataatctttattgtccatcatgtttcgctcctattcaacgaattcaaattctccgccaagaattctaacgatatcaccatttttacaaccacgttctctaagcgcatcatcaatacccatcgaacgcatttgacgagcaaatcgacgtactgctggatcactgttaaagtcagtcattttaaacattctttcaatagcattaccacttaccacataagcaccatcatcatctcttgaaattgtaaatttatcttgtgacggtgtatgtttatataatactcggttaatgccaactgactcctcttcttcaactgtgaagtcaacatctttatattcttctaatttatctgctattgcatataataattgatcaatattatcacgcgttattgttgaaactggaataactggcacatcttcgccaatttcttctttaaacaagtttaaattatcttgtgattcaggtaaatccatcttgttagctactacgatttgaggtctatcttctaaacgttgctcgtacgcagctaattcttgattaatgactttataatcttcaataggttctctaccttcagaaccgctcatatcaatcatgtgaacaataacttttgttctctctacatgtcttaaaaattgatgtcctaatccaacgccatcagatgcaccttcaattaaacctggtaaatctgccataacaaaactacgttgatcaggcgttgaaacaacacctagatttggtttaatcgttgtaaaatgatatgccccaattttaggcttagcttttgaaacgatagataataaagtcgatttacccacactagggaaacctactaatcctacatcagctattaatttcaattctaaagatacatctaattcctcacctggttcacctttttcactgaagtcaggtgcagggtttctaggtgttgcaaaacgtgaattacctcggccacctcgaccgcccttcgctactacagctctttgaccatcttcaacaagatctgctaacacttcgtctgtttcaacatttttaataattgtaccaggtggaacttttaatactaaatcttccgcatttttaccatgcatattactactttggccattttcacctttgcttgctttaaaatgacgttgatatctaaaatctaataacgttcttaaaccttcatccacttcaaatacgactgaagcacctttaccaccgtcaccgccagctggtccaccaaatggtacatatttttctcttctgtatgcggtaataccattaccaccatcaccggctttaagagatattttgacttgatcgacaaacatatatctcacctcttttacatataattttcattttcccaataattatagcatattagagccccttatatattgtaaataattaggggctcttatgcagttacttttataaatctttgctttaaaatacttatatttctcagcaccaattgtggtacagtttattctttaaacgctgcaactgtattcctttgtcccccttatagtttagtgattaggggctcttatacagttgcacatttagtataacgtctaaaatccccattttttaataacataatgaaaataataatgaaaaacattttataaaaagtaaaaaacaccagaagattcacttctggtgttaactagacaaaattattcagctactgcatatacagaaacttgttttttgtcgcgacctttacgttcgaatttaacaacgccgtcgattttagcgaataatgtatcatcgccaccacgacctacattttcaccagggtaaattttagtaccacgttggcgatataaaattgaaccacctgttacgaattgaccgtcagcacgtttagcacctaagcgttttgattcagagtcacgtccgttttttgtagaacttaccccttttttagatgcgaagaattgtaagtttaattttaacatcggaatgcacctcacttataatttaatctaatattctcattatattcttcttcaatagtttgtaaagacacaagcattgtttgaagaattagttgcgcttcatcgttgtttgtatcaacgcttcttatataaaaatgaccaccattgtcgtcataattgatatctggtctctcagatgtcaatcctataatcgcattaacactaccaaacaatacagctgaagctccagcacaaacgatatcatgaccatattcaccatggtcagcatggccatccataataacgtctgttactttgccttcatcattaactgtaatatcaacagtaatcataataattacgcgttgattttatcgattgttaatttagtgtatggttgacgatggccttttttacgttttgaatttttacgacgtttgtatgtgaatacagtgatttttttaccgcgaccttgtttattaacagtagcagtaactgttgcaccttcaactgttggcgctccaactttaactgaatctccacctacaaataatactttatcaaatgtaaaagtatctccttcgtttacgtctaatttttcaatgaagatttcttgaccttcttctactttgatttgttttccacctgtttcaataatagcaaacatactttgcacctcctgtataataagtcacgccatacataggtgacatttcgttattgagtcaagcgtttgcactctgtgggaaaatcgctttcttcattaaaaatgttcttgaacctatatttgagcggttgtatgtagctacttataactactcaactattgcatcttaccattgacgacgtttcatgtcaatgtcattgtttgtttttttaaggaactttataatcaacggataaagcataatcaacagtacaaaattcataattaatgttggcaataatctaaagactacaaaatgaataatatcaaattgaatgaatcctaacataccgtatattaatgccacatagacttctaataataaggtgctggctaatataataatgaataacatcgaatgatctttgtaaaaaattttaaagaatcgatctataagtgctaaaaacaatatatagccaaataagtacactccataaatactaccaaagtatacatcagtcattacgcctaaaaatatgctgagcaataatgatacgccaaagacacgatacactaccatcattaaaatatacataaatgtaaggtgtggtacaaatacaagttcaaacttacctatgtgcattggaataagaagcccaattgcagtatctatataaaatagtaaaatacctatcaaaaaataatacagtgtacgcattatttatccctgctttcatcatcaggaattgttttaggatctctttttgcaacataaacatgactcaaatctgttaagtccgcaccagtcttaaccctaacttctttagctaagccgtattgatcattttgaaccttagtcacttctcctatatataaattacttggtagttgatcagctaatccacttgtaacgactttatcaccttttgagatattatctctattattaatgtcactaattacaagttctgagttcttttcatcataacgatcaattaaaccaaatatatttttagaaccgtgttgtatatttacagataatttacccgcacgtgtattagttgagattaaatcaacttgtgaagaaaatttattaactttagtaactcttccaacaaaaccttgtgatgtcatcacagccatatttgaagttatacctgatttagatcccttatcaattacaattgtattcatccactgatccggatttcttgccaaaaccgtagtagaaataggatcaaattttgaaatatcttttaaatcaagctctttttttaatttttcattttccgcttctaattgttggttcttagattctaactggctaatcttatttttagattctttagaatctccttttttaaaaaagtccccaatcgtaccagcaacaaaattaactggataactcacaactcgttgtccaaaagacacagaatcacctatatattgttcaggaggtgattgagattgtgaacgtatggacagcccaattaatgcaataaaaacgataattgcacataaaacaacaattaatttgttatttttaaaaaacttaagcacccagaacacctctattatgtcaaaatattgtatatccttttctattttatattactcccattatgaaataaagcactaactacgaattactttgaaaatgaacaactccgtaaaaaatttgtggcattttaaaaacaaaaaaactactagcaaacattccagtcactagtagtttaaataatcgatttaaattttaaaattatttgtttgtatcgttcgaggattcactgttcgaattctgaagttgtctccaacgtgcgaataagttctgggccttttgttgttcattagcttgtttctgttttgattgttctgccatttgaactacaccaaccttttaaatttattctagtgacaggataactaaaatatatttcttatgcaataatttcctattgataagcattttcagattttagttgtaaattttgccctaattcatttaagtcttgttgcatttcaaattcagtattgtaaacacgcattgactcatctccaaatttataaagaataaattcgtctcctctttgacctataatatattgatcattataagccatgcgattcattccagacacagccataaactcttgtttatctatcattttaaatacatttttaatttggcttaatggtacattctttattaaatcattttcttttaatgaatatttctcaccacttacataaacatgttgggcatcattagtgggttgcgtaacttgattcatttgatcattatcgtgatttacaggattccaatcttgttcttttaaaaaaggtgcgtatttcaaggcgatataaacaattatcacaattgctattactgctataatgtttttaatcatactaaatatcaatctcatagttcgcctccaatgtcttcatctaattatatattttattatgtatattttcctcagtcttcagccttaatcatgatatatcttaggactgatgcacgttcatttaaaatagcttataattttgttatgatttaaaagcgtattaggaggtttgtagcattgagtatactaacaattattttaatagcactattagtcatcctcctttttagagttggactttctattttgcgatttttaatttatgtcggacttgttttattatgtatttacttaggatatcaaggtttaatttggttgctcgatttttttcaaataaatagtggatttttaccgcactttcaatttaacaattaaatttattctgcataacaaaactcctaatgtactagtttagaattttttaactagttccacattaggagttttagtttgttttcaagcacggatactacttgatgaacagattactattacttacgcccaaatgcgttagataaaaatcgtatcagcgcgtagctaccacttagtaaaaggccccaaacgattccagtaaaaattgagccaattgctacacttaataaaggaaaagcttgtttcgtaacgattacacctgctaacgcggttactaaaatacctaacgtagataaagctaatgttattaaaagattgcgctttgttacaggttcatttttaatatttaactgcatggtataaaccattggcacgagaaccccgataataataaatagagtcactatttttcctccaatgaaagtacttcgtaggtattatacacaagatacgtcattaattctatcaacttcaatcattttcatcaaagtaacccgcttctacaagactggtaaatctattatcaccgattataatatgatccaataaatctatccctaaaatcaaaccacactccttcaacctcattgttgttatgatatcttcttgtgagggcgtcaagctttatcaagagtaaattacaaaagaatcatttaaatcaatactttcactttgaatacatgtatttgaagtggaaggtacttatttcaaaaatagtaaaacctgtatcttaaattacttaatagtaacataagatacaggctgattttttattcattgttatttatactaaagcacccgatagctctgaaaacaatcacaaattcaacttttcaaagccacagctttaagttattttgtccagacaacccccattgcccaacccattttatggaattggcatccaggcaacaacttttcatataaatcgtaataattttgttcagataggtacttatctgaagctaaatgctcaagccatgatttagatgtgttgtgattataaattctaatcgcattttttattccaaatttgaaacaatgcggtaaaaactcttggattgcccctaatttataaacataggtaggcggtgtctcgacttcagatacattatcaagaataactattcttccttcctcattcaacagttccttcatttgctgtattacgctggctatatcatccaaatgatgaaaggttgttcggcttacaataaaatcaaacttctcattaaaattaagttgttctgcattcatattcagatagaccgtatttgttagttgacgtttagatttggcaagatcgagcatttgattagaaatatcaatccctaccacttcatcataataacttgctaatttctccactaacaaacccgagccacatccgatatctaatgctctgcctttctttggagacatattagacacaaagaatgaataatcattcaaaagctcattcacgaaatcgtaatcttctgcaaccttatcaaactgtgattctattgtattcaaaaagatcccccattcctactttatcgacattctttcattacttaccactttagatgttttttcgttggggataaaacttccctttagacaattttatccaaagacaatacaacagtgcaactttattaaagtcactgtcctttatcgcagcctttactttttagtaaagacagtggcttctcttatcaagtttcaaaacatattattttgaagaaaacgtccatctgaagtgtcaagtgcaaaattacatataaaggtttattctaaaatgaaaagatgatacaatcatattcagttacataaggaggtttcaattatgtgcaccagtatcgcagtagtagaaattactttatctcattcataatgaaaaaaatggaaaggagataaaagtatgggtactttttctatatttgttattaataaagttcgttatcaaccaaatcaaaattaattggttataatgaacgcttaatgtcagttcattataaccagtaaggagaaggttataatgaaccagtaaggagaaggttataatgaaccagaaaaaccctaaagacacgcaaaattttattacttctaaaaagcatgtaaaagaaatattgaatcacacgaatatcagtaaacaagacaacgtaatagaaatcggatcaggaaaaggacattttaccaaagagctagtcaaaatgagtcgatcagttactgctatagaaattgatggaggcttatgtcaagtgactaaagaagcggtaaacccctctgagaatataaaagtgattcaaacggatattctaaaattttccttcccaaaacatataaactataagatatatggtaatattccttataacatcagtacggatattgtcaaaagaattacctttgaaagtcaggctaaatatagctatcttatcgttgagaagggatttgcgaaaagattgcaaaatctgcaacgagctttgggtttactattaatggtggagatggatataaaaatgctcaaaaaagtaccaccactaaattttcatcctaagccaagtgtagactctgtattgattgttcttgaacgacatcaaccattgatttcaaagaaggactacaaaaagtatcgatcttttgtttataagtgggtaaaccgtgaatatcgtgttcttttcactaaaaaccaattccgacaggctttgaagcatgcaaatgtcactaatattaataaactatcgaaggaacaatttctttctattttcaatagttacaaattgtttcactaaattaaagtaataaagcgttctctaatttcacaagaggacgctttattcttcccaaaaattgttcaatatttatcaataaatcagtagttttaaaagtaagcacctgttattgcaataaaattagcctaattgagagaagtttctatagaatttttcatatacttaacgagtgctttcacctttgaatatagtccttcccacttatcatcacactctccccgatagccttttctagctatatccagtaaagttacatgctctttaggtaaaagaggtatagcccattctgcagcgacatctttcgaggtaatttcaccagtagtcactgtttgccacattcgagctagggttaaaattacattacgctcatcaccttttatcccctcaattagttctggcaaagaatccttaattgctcttcgaatatctgtcaaaggtacggagacaagtatacttgaagaatcaggaccaaatagagaaatactattctttcttgcttgtgctaaaacaatagccaaatcaggatcatagcttggttcctgaatttgtccattctcaaattcacccctgagccactcaccgtatataaattctctttttggaggatattaccaagggacaacttcactcctatttataaccgtaacttcaagtggtctaacagaatccgtatttccaatctttcctgatatagtcattagtctttctgttagtttttttcgagttaattgaggtaaactatgattcacgacgactagaacatctacatcgctgttaatgcgtaaaccaccatttactgctgaaccaaatagatatactccaactattgaacttccaaataaatcttttacgatttttaatgtttgaatcgcttgatttggtatttttccgttaatcaaattgctcatgatttcacctcgttgattatgttcatataaagtttatattgatactcaatttacttaccctagattggacatatacttaaattactgttcaataaagctgaccgttagcgtttaagtacatcctttcacaatttgtctacagattaataattattctttattatacagatctccatataatttttgaatttggttctgtaattttttattttctttttctaattccattactcttctttttaaggttttaataaggatctcctccgaacgagaacttttcttgggttttgagactacatttgctgttatttgacgctcacgaagggattcgattctttgcctaatatcgtgttccttataaagccatgatttagaaacattagcttcctttgctattgaattaaaattaataactttaccttcaatcgaaaatttagaaatcgctttgtctactttttcccttgtcttttttgatttctgcttcgccaaacgtacaatttctgttgtatttctaacttgtttatccattgataattaccccgtcaaacttccaatgatttgttctaaacgctctttaacacggctattagtctctacttgtctttgccattcgtttatccttagctatggctaataactcttctgtacgctctaactgttcttcgtgctgtggtaagaattgcttactggtacagaagtgagtgcaatctaagcatgcattcgcatgtggacaaccacctgctactactggcaatctacaataaccatttggaagcacttgtgcatttatatttttcttgaaccattgaagctctacatcatcgacttcattatcttcatctagatcaagcacatctccattattggtaaccagtttttcctgaaatttagtaaattcattttttagagtttcatcaaagatatgagcgtatctgcttgtcatttctgggctttcatgccccaaaaatttctgcacaatatgctggggcatcccgttgttaatcattcttgttcctactgtatggcgaaaggcatgggcatggaatctataaatctcacctgatttatccactatattttgctcataagctaatttatttaactcacctctaaatgtttcttgttttaatggcgatccatcttttcttggaaagaggtattcactatctggaaattcctctgaaactttatcttcccgaactttaataagtaaagctacctctttagatattggaactatatgctcctttttcattttccattgataatactttaaaagaaatctccatctttgtcctctaatagacagccttttttcaaggtgcacaattcacttatcctcattccacattcttgaacaatcatagtcatcgtagctatatattcgggtaatttatcaagatgactgttcaattgctctaggacgaattcgtctataaagcgtggttttgctcttggtattttcggatagtcctcagaataaattaatattttggaaggaacatcatcccattctagcctaagaagggtactaaatagtccttccaatatagagatcctcccagttattgtactaggttttattcccatcatgtttagttcacttaaatatgcttcaatttccactctcgttaattggtgtactctctgaacttgtttaaatttcatgtccagaaaattaaagaactctttaagtctttgggcaatatcacttacataggaaaagctatccacgttcaatctcaacttacaatatctttttacaagctgtttaaaatatgtattccgaaaccctttaaagttaattgtatattcatattgtgttgggttaaccttatcatctggcaaaggtaagttacgtctatcccaaacgtctttatcccactcctctccatcaaaataaaagttctcataaaactccataaattgttttagattagtaacatagtaggaattagcttttacaggtgttttttcttgattagcagtaatcttataattagtagtggtaattctaacaccccgttttgtcaaataagttctatactccgtcattgctttttcaataggaacttcagtaattgaagtaatgctaggatactttaaatctaagaaatctaacattttattaattactgttccttttctaatccagacagtttttgcattccatattccattgtttaaatggtaaaaataaaaatatttcaattctgttcttaaccacagatttttaacacgttcaaaacgaacccaacgattccttaaagcaggattcttacttaattctatggcagaaggatgtggacattttcttatatcccaactattattagcccaaaacccctgcatttcttcattcattacagctatttttttgctaatctcactctgactaataattttccttttactagaagcattcatttcttatgctcctttctctcgaggtatttattaaactcatttttcatatcctgatctgaaagatgaacataggtatttaacgttgtctgaacatgtgcgtgacctaatctcttttgaacgaacgcaacatcccatccttccctaattagctgcgttgcgtgagtgtggcgaagcatatgtgatgtaaattctattccagtccttttaactattcttctaactagatcaagaacactttggtactttagtggtttcccaaaatagccttcttttaaggaaataaaaacataatcatgctccaattcctcactatactcatatatcaagtaatctgtataaagtgacataagttctttactcacatgtattgttctttccttccttaatttaatataagcttcattaacattaacatctctaggtgttaaatggatttgattgtcccaagtgacaatatcttcaagcctaagcgataacacttcaccgattcttaaaccaccctcatacataagcattaaaattaatttatctcttttcgtatgacaagcatcaataatttgcttaacttcctttgatctcaatgttcttatctgtttctttttaacccttaactttaagacattcttttggtatctacccttattaacatgatgtaaaaatcctttgaaatttcttccctttgcttgtttaaatacatcaattgatttaaattctcctaatctacttaaataatcaagaaaactcataactacatttaaaattgtattcactgtcgtttcttctcttatggctttttttgactgaagatcaattacatttgatgctgaaggatatctcaaccaacctacgaagtctgctaacaactcaaagttaatatcattaagaataacacctctctgttccatgaactcgtacagcaactttaaatgatagcagtatgccttaatggtattaggagacttaccagtattatctaagtatttaataaatttcattactggttctattagctggtattctttatctagtaataaatacaatggatacggcttattctccacttctatcctttgaaccttcacatgttcccacctctttaaatactttaactactacaaattataaaccttgttaatttttatttaaagtaaaatatccctttaatatctcctcttaaactactttaactactattatttattatactatggttaatacatcaccggatggatgattatgaactgcgatgattgcattggcattttctctcaccgcaatactaaaaatttcacgtggatgtacaatcgaactatttaatgtacctttaaaaacacaggtttctttaatcactacattttttgaatttaacaataaaatgacaaaatgttcttgtgttaaatctttcattgttggaatcatataatcagcaacatcacttggttgcgttatttttatacgattattttcagctcttctccccatcctttcccctaactcaaatgctgcttttaaagtaattgctttttgtaatccaatccctttaacttttatcaaatcgttaattgaagattttttcaattcattcagattcgaagcagatttaagcagttcattactaatgtctatgctcgagaatccttttcttccggtgttaattaatatagctaataattctgtattcgaaagactttttgcaccatggcttaacaaacgttctcttggcatttctgaagttaccatttctttaattttcaaaaatatacgcctcctaaaaattgatggatatcattataaaaaagtgaattgataaaaaaggaaataaatataaatggaacaaggggtaatagtttaatcggcttaaatatcatggtaattaaagcaactaaaccagcaatgacaaatgtaaataaaatgacataaatagtgaattggagagggaaaaacaaagaaagtgcagatattagtaaaacgtcaccataaccaatatatgcccgaaataaaaagtagaatatatgcgtggtcatactaataatgataaaagctactggataaatcatacttaacgagagagaaacgatacaataaattataattaagcgacaatctaacattaaagaagtgatatcggtcatagtaaaaataagcagaaaaacatatgtagttataaatagcgtagcatttacgtatgtgaaatcatacttaataaagacgataggtattaaagcaaaggtttcccctaagaaatgtgttagggaaatacgctttcgacagtttcgacatcgcccttttaataataaaaaactaataatcggcattaattcataccatttgagtgacgaattacaataatcacatttcgatcttctatgtaaataatcaaatgacgtttcttctatagatataaattgatatagaaaactaaaaatacaactgcaactataagataacaatactaccaaatgacaacctccttatgtaaattatagttagttattaccaaaatgtaaatatacactatttttcaagaattgaaccgctttttcatttaaatttttcaatattgctaagcataattgatggatactttaacaacccattactgctcggcaaaattaataatggcaagaaattgaaccttataaacacatacgatttagagcataaaaaataaccatgaagctctacctattgattaaatagattcttcatggctattttagttttagttttataatgcttcaaagtctaattttgatttaacttcacttatgaaatacagactaccggtaattactaatgtatcaccttgataattttttataaattcaacgtagtcatctactaattgtatttcatcattttcaatactacctacaatttcttctttgcgtaacgctttcggaaaatcaaattcagttgcataaaacgtatgcgcaattaaacttaaatgtttgaccatctcgttaatcggttttccgtttattgctgagaacaaaatatctactttttctttatcatggtactgtttaattgtatcaattagagcatctatactctctgaattatgtgcgccatccaaaatgattaaaggtttgtcatgcacctgctcaatacgtccagtccaacgaactgattcaataccgtctatcatcttattgaaatctaattcaattaatccttgttcatttaattcaataagagctgttatggctaatgcagcattttgtttctgatgttcacctaacatgcttaaaatgattgtttctaattcataatctttataacggtaagtaaattcatcattttgcgatacaacaacaatttctctatctaattcaattggctttgcatgttgttcaattgcgcgttcacgaacatattttaatgcatcttcatttttaacagcatatatcactggaacgttaggctttataatcacgcctttatccctagcaatatctagataagtaccacctaaaatatctgtatggtctagaccgatactagttaagattgataaaaccggtgtaaagacatttgtcgaatcgttctttatacccaatccagcctcaacaatgacaaaatcaacaggatgtatttcaccaaaatataaaaacatcatcgctgtgattatttcgaattcagttgcaacacctaaatctgtttcacgttccatcatttcacttactggtttaatacgtgatactaattctacaatagcgtcatttgatattggcacaccatttagactaattcgttcattaaatgtttcaataaacggcgacgtaaatgtacctacttcataaccattttcaactaaagctgttctaaggtaagcaactgtagagcctttaccatttgtgccacctacatgaatacccttaatgttattttgaggattattaaattgtgctagcatccattccatacgtttaacacctggtttgatgccaaatttagttctttcgtgtatccaatacaagctctctaggtaattcattgttactaactcctatgcttttaattgttcaattcttgccttcacaccatcatatttttcttgataatcttgttttttacgtttttcttcatttataaccttttcaggtgctttacttacaaagttttcattagagagctttttatctactctatctaattcgctttgaagtttagctaattctttttccaaacggctgatttccttatccatatcaattagcccttctaatggtaataccactttacctgcaattacaactgatgtcattgctttctcaggaatttccacgtcagtgctaatatttaaggtactaggattacagaatttgattaaataatctttgttttgtgataaagttgtttcaatttctttatctttagcttgaattaaaataggtatttctttagacaatggcgtatttacttctacacgtgattgtcttacagatttaatgatttcaacaagttgttgcattgtttgtttactttcttcaaaaatcaatgattcacgcacttctggccatgaagctttaacaattgtgtcaccttcatgtggtaaactttgccatattttctctgttacaaatggcatgaatggatgtagcattctcataatattgtctaaagtataactcaatactgaacgtgtaacttgtttttgttcttcatcattactattcattggaattttactcatttcaatgtaccaatcacagaaatcatcccaaatgaaattatataatgcacgtccaacttcgccgaattcatatttgtcacttaaatcagtaactgttgcaatcgtttcatttaaacgtgttagaatccatttatctgctaatgataagttaccacttaaatcgatatcttcaactttaaagtcttcaccgatattcattaaactgaaacgtgccccattccagattttattgataaagttccacactgactcaactttttcagttgagtatcttaaatcatgtcctggagatgaacctgttgctaagaagtaacgcaagctatcagcaccgtattcgtcaataacatccattggatccacaccattacctaatgatttactcatcttacgcccgtcttcagcacgaactaaaccgtgtaataatacatcattaaatggacgacgatctgtaaattctaagccttggaatatcatgcgtgctacccagaaaaagataatatcgtaacctgtaactaaggcatttgttgggtagtatcgtttaaagtcttcactttctaaatcaggccaacctaacgtagagaaaggccataaagcacttgagaaccacgtatctaatacatcttcatcttgttgccaattttcaatatcagttggcgcttcttctccaacatatatttcgcctgtttctttatgataccaagccggaatttgatgaccccaccataattgtcttgaaatcgtccaatctctaatattttccatccattggttaaatgtatgttcgaaacgttgcggataaaaatcaatacgatcatctgttttttggttatctaatgaacgtttcgctaagtcttccatgcgcacaaaccattgtgttgataaatatggttcaacaacagcgccagatcgttctgaatgacctacagaatgaacatgatcttcaatcttgataactaaatcttgttcttttaaatctttaactagctgtttacgacaatcaaaacggtccataccttcatatttacccgctttgtcgttcattttaccattttcatccataacgataatattttctaattgatgtctttgaccaatttcaaaatcattagggtcatgtgctggtgtcactttcatagcaccagaaccgaagtctatatcaacatactcatctgctaaaataggcagttcgcgtcctacgattggtaatataacagttttaccgattacatctttgtatcgttcgtcattagggttaacaacaatcgctgtatcacctaacatcgtttctggtcttgttgttgcaatttcaataaaaccttcaccatcagcgtaaggatatttaaaatgataaaacgcaccttgaacatcttcatgtattacttcaatatcagataaagctgtacgtgctttaggatcccaatttataatacgttcgccacgataaataattcctttattgtataaatcaacaaaaacttttttaactgctttacttaaaccttcatctaaagtaaaacgttctctactataatctaaacctagacctaatttagcccattgcgcacgaataaatgacgcatactcttctttccaatcccatgcctgttctaaaaacttttcacgaccaagatcatatctagttattccttgttcatttaatttagcttctacctttgcctgtgtcgcaataccagcatgatccatacctggtaagtataacgtatcgtatccttgcatacgtttcatacgtgtaatgatatcttgtaaagtcgtatcccatgcatgtcctaaatgtaatttaccagttacatttggtggcgggataacaattgtatatgtttcttttgatttatcttctgacggtttaaaataaccattctttacccattcttcataacgtcccgcttcaacttcacgaggatcatattttggtttcatttccatttgctatacctcctaaaaaaataaaaatatccatcctatatacaaataggacggatattccgtggtaccacctatattcaagaaggatgattaatatcaaattcactcttttaacataattggaataatcataccaatactatcatcgtgaaatttgaaatgcttcatctcttcaagcactctagattatgattaacgctcaaacacgtcttagcctactattaatcacgttcagctaagatactctgtgggctaccttcagtaaaaatcatttacatactcacaccaaatcatatgctctctttaaaataatttgaacttactcttcccaaatcctatattaaactcttaacttatagtataatgattgacaaaataagtcaatgtataggtgggaataaaatgaatgaatgcgcatttggtactaaagatccagtctacttagactatcatgatcatgtatggggacaaccgctctatgatagcaaggcattgtttaaacttttagcattagaatcacaacatgctgggctatcttggttaactattttaaaaaagaaagaagcctatgaagaagcattttatgatttcgaaccagaaaaggtagcacaaatgaccgctcaagatatcgaccgcttaatgacttttccaaatatcgttcatcatcgtaaaaaattagaagcaattgttaatcaagctcaagggtatttaaaaattgaacaagcatatggtagttttagtaaatttttatggtcatatgtaaatggtaagcctaaagatttgcagtatgaacatgcttctgatcgtatcacagttgatgatactgcaacacaactatctaaagatttaaaacaatacgggtttaaatttttaggtccagtaacagtattttcgtttttagaagcagccggtttatatgatgcacatttacaagattgtccatcaaagcctaaacataattaatttgctatagcatcataaagtaaacgagacatcatctatttttaactaatagactgtctcgttttttaatgtgaaaatttattcaaatcataagttaaagttccaagttaatgctctgctaatattagatatcttaatctaaaaatagatgtacaacctttgcttaaaccttaataatgaattctatcctaagcataattcaacttagatggatgatagtttctaatcttcacgcttattcgaacgatattttaaaaagtaattaattcctggtgcaataataaataggatgaaaaagattcggaaaatatgataactcgtaatcatagcaacatcggcaccagtagctaatgcaactaaaactatctgattaacccctcctggtgctgcaccaagaaacaattcattaataggattattatcaaagaaatgtatgatataaaccatgattagcgcaccaattatcaacataatattttgaattgtaattgcgattgctagtctaccttttaaatctgacaataaatgcgcaatttgaactccaattctaatcatatatattagttgtgccatgttcaacaaccaatgatctagtgtaaatgttaaacctgtagaaaaattccaaacaattaatacaatgagtggtgctaataattgaaatgttggaaactttattttagacataattagataaactataaagatagctatcgctaaaataactatttgccctatgtttaatacttgtgataaaggcaagacttttgttaactttccattcgcatgcatgttaccatcatgaaaaaaatatgaaatgaacggtactaaaacaacaacaaatataattcgtgatgtttgcgttaagctaacaactaacaaattagcacgtttgtcttgttcagccatgaccagcatttgtgttagtgctcctggtataacacttaaaatagctgtttctgtattaatacgtgcaatttttttaaaaacaaatgccattactattgcaattaataatatcgaaatagatacaacaataatcgaaagccaattgtttttaatatccataacgacatttttcgtaaacgttgatccgatttgcacacctaatagtacaatacctaattcactaagtaagaatggccatttaatatcaagtttgaaaacttttacacaaatgattgatgcgataataggaccaaacataaatggaagtaatacgtgcgatgaatacagtagaatactaataaaaaatgataaaacgaacacaatgaaattatttctatatatcattgccatgttttccacttctttcaataaaaaataaaatgactaaattgctgcttgagcttcacgtttgttaagataacaatatccgctagcagttttgactacaaagcatatatggactttcactatcaagtcgccgcccatgccttatatacatttaaaaagagcctgaacaaagttcaggctctcaatttgtccgtatatttattttacaatacgacttaaagccgtatcaaatgcttgaatcgttttttcaatatcttctttcgtgtgtgccgtagataagaatgtaccttcaaattgagatggtggtaaaaacacaccttcttttgccatttctcgatacatttctgcaaataatttcaaatcacttttattcgcttgttcaaaattagttacaggtccttcatttaagaaataaccaatcattgaacctgctctatttacagttattggtacattgtgtttagcaaatacacgttttaaaccgtcttcaagtatatcgcctaacatattaaaatactcatatgtctctggcgttaattggcttaacgtttcataaccacttgtcattgcaagaggatttcctgataacgtacccgcttgataaatatttcctaatggtgctatatgatccatgatttcttttttaccaccaaatgcacctacaggtagtcctccaccgataacttttcctaagcaagttaaatctggtgtcacaccaaagtaaccttgtgcacaatgataaccgactctgaaaccagtcattacttcatcgaaaattagcaatgcgccgtattcagtcgtaatatctcttaatccctgtaaaaaaccttcaatcggcggtacgacacccatattaccagcaacaggttctacgattacaccagcaatatcgtttccaaatttttcgaaagcgattttaagtgcatctaaatcattgtatggaactgtaattgtatttttagcaataccttcaggcacaccaggagaatccggcaatcctaatgttgccaccccagaaccagctttgattaataacgaatcactatgaccatgatagcaaccttcaaatttcacaattttatttctgccagtataaccacgtgctaatcttaaagtatccaatgtagcttctgtaccagatgacaccatacgcactttttctattgaaggtactcggtcaataacgagctgcgccaatttattttcaagtaatgttgatgcaccaaaacttgtacctttatcaattgcttcatgtaaatgactaataacttgagggtctctatgtcctaaaataagtggtccccaacttagtacatagtcgatatactcgttaccatcgatatcataaatttttgaacctttaccgtgatccataaaaattgctggtgtatctactgatttaaatgcgcgtactggactatttacaccaccaggcattaaagtttcagcaaccttcattgcttcttctgatttcgtatatctcataaagtaaattcctcctacagtttatggaaaatcataaatataaaaccttatttgtctaaatagcgacaaatgtcctttgcaaaatacgtaataatcatatcagcacctgcacgtttcattgaaaccatttgttccataacgacacgttcttcatctatccaaccattttgtgccgctgctttagtcatactatattctccactcacattatatgcaacaactggaacattcgtatgatttttaacatctcgaactatatctaaataacttagagcaggtttaacaatcatcatgtcgcacccttctttaagatcactttctaattcacgaagtgcttccaaacggttagcagggtccatctgatacgtttttctatccccaaatgatggcgctgaatctgctgcatctctaaaaggtccaaagaaacttgatgcatacttgacaccataactcattataggaatattgtaatagccggcttcatctaatccacgacgaatttcagcaacaaaaccatccatcatattacttggcgcaataatatcagcaccagcttccacttgagaaattgctgttttaacaagtagtggcaatgatttatcattgtcaacgtcatgtgtatggtcatcaatcacgccacaatgaccatgatcagtatattcacataaacaagtgtctgcaacaattaataagtcatcatacatttttttagcaatacgtgttgcctgttgaataacaccatcgtgaatgtatgcaccagtacctatatcatcttttgagtttggaacaccgaaaaacataatggcacgtatgcctaagtcataagcttcttttaattcactttcaagtaaattcaaactgatttggtatacacctggcaatgacttaatttcttttttcacatcgtctttttcaactacaaaaattggatatattaaatcttcttttcttacatgattctctctaaccatatctctcattgtcgctgatgatctcaatcttctatgtctatcaaatttcatttttagcccctactttctaaaatcttttcaattagtgattcgagtgtttgaatttctgcaattgttactggttgttgatatgatttaatggtccgtgctgtttgttctccaatagcaaaatacgacttgaattttggtacaaatccttcattaaaataataacgtactgccgacgaacttgaaaatgttaatgcatcgatttgttgatgttctatcatttctttaacatcttgtatattttgtttgttaggcactgaagtatataaatctattttaacaacttcattatctttagataacgctgctaataacaatggtctcgccaattcactcgaaggcaaaagtattttttggttagtttgattaaatgattttaaaaatccttcttgagaaaagtcgtttggcataaaatcaactcgaatgccaagtgattcacaatattgcgctgtcttacttcctatcacagcaatgttatcaacattaattccttttagatatttataaaagaatttcacagcatttttagatgaaaaaataagccagtcatagcgttgatttaacaaatgaatatcaaaatttagtggctttatatcaataaagggtttgtgaataattgatactaaatcactttgcatgtcatttgtttgtgtcataactacaactggcttcatatttaaacgtcactccattatttaatgttgttcatttaagcgttttataatttcataagcaccttgctcttttaatttgttactcactgttttgcctaactcaaccggatctgttccgttcattgtatattcaaatcgttctttaccatctggggtcataattaaacctgtaaattcgatttcgttttgatctgagattgtagcatatcctgcaattggcacctgacaactaccatccatttctgctaaaaacgttcgttcagcagtcacacattttgcaacctcatcattatgtactttgcttaataatgttaatagttcttcatcgtcactacgacattctatccctaaagcaccttgtccgattgcaggtaacaatgtatctctatcaagataagatgttacaatatcatctgaccagcccattcttcttaaaccagctgcagctaaaataatcgcatcataatcttcagtttgtaacttttctaatcgtgtatctatattacctctaatccatttaatctctaaattaggatacttagataatatttgtgcaccacgacgtaatgaactagtaccaataatactgccttctggcaattgggatagtggtgtatgtgttttagaaatatacgcatcaaaaggtaattctctatcagggatacaacctaatgttaaaccttccggaattacacttggtacgtctttaagcgagtgtattgccatatcgatatttttttcaaaaagttcatgttgtatttctttaacaaataagcctttgcctccgactttagacaattgtttatctactatacgatcgcctttcgtgacaatttctttaatttcaatttctagatttggctcgacagcttttaatttatcaataaattgctggctttgtgttaaagctaatttacttcttctggagccaacgactaatttacgcatgttcaattcctcctaggaacggattgctctagattattttctcaattcacaaaatgtgttgcaaaaaataaattaatcatatttaagcaaaataaaataatgttatagtatattaaatatcttgaattcaaccatttgttgattctaagtaaaatataacttccatataatactgtaataattgaagagagtattaccttcgggtcaatgaatatacgttcaccaactgaaattacaccccactgtgtacctaaaataatactaaatatgagaattatccacccacttaacgttgagtaaaacacaattgattcaagtgtagcaacgctaccaattctaaagtatttttgatcaaaacgtttttccttcaaattacggtattgcatgatatacagtaatgcattgacaaaagctaaggcaaagaagacataacttaacacagctagaccgatatggactaacagtaactcgtctacaacagcaattttctgaaccttattagtataatgtgtcggttgaaatgtattcatccctaaaagtgttaaccctattaaattcaagaaaaacacagagaaattcaaaactttgataaggttaagaattaaagagattgaaataatcagccaacttaaagtatagaatacatctgaaatagaccctaatggaatatgtctagtttgtataataaaaatagataaagagattgtttgtaaaacccaaacaatccccaataaatatatgcctaaacttctaatcttatgacttttttgtacaaaatcataaaaatagcaaatgatactgattaagtatattaataatataatttcattgaatcgaataaacaggttttcttgcatattatcaccatattaatatgcttattcaaaactaaagatacgtcgcgctgaaatttccttgaccttgctttctttttgttgcttcgcttgctcatgaggacattcagcttcgatatcaaatatattttgaaatagctctaatttttcattacttttcttatcactacttaattctttggcctgtttaataggatctttcaacatttgattgatgatactttttgtatgtttagatataattttacgttctctttcgcttaaccctggcaatttacgatcaatactgtccatcgtttctgcttgaattgccatagctttttcacgtaaagctctaatcactggaacaacacccaacatactaatccactcattgtgtgcatgtatttctgcaggaatttgttccgaaattgttgcagccgctaattgtcgctcacgtaagtttgcatcaactaaaccttttaagtcatcaacatcataattaaagatgtttgtgatggcactaataccaggttcaatatctcgaggaactgcaatatcaatcaatactagtgaatcttgctttctattttctgcaattctttctatcatttcatttgtaatgatataagattgtgcactcgttgaactaatcacaatatctgcactttcaagtaaatttggtaatgatgatagttcatcatatttcacttgatgctttgctgctaatttcatagcattttcaattgttctatttactactgtaatatcagtaattccagaaccaagaagatttaatagtgataattcactcatttcccctgcaccaataatgatagcttgcttacttttcaatttgccaaatacttttttcgccaactcgaccgcagcataagacacacttacagcattatcagctatatctgtttcattatgtgctctttttgcaaaagtaattgcctgtttaaatagatgattaaaaattgttcctgtcgtacctgtgctttgcgctaagaaaaatgcatctcttatttgacctaaaatttgagtttctccaagtacgattgaatctaaaccagaagtgacacgcaataaatgttctactgcttcgtcccccacttttacttctgacattgctttaatatcatctacttcaaatccaaatgcacgagctagaaatcgttgaatatagtaacgacctgtgtgaatttgatcaacaacagcatatacttcagttcgattacatgttgataatatgacattttctaaaatagatttagtttcatataaatcttcatgggcaattcgtaaggcatcatctctaaaagcaacttgctctcttagtgcaacatcagctgtgcgatgatttatactaattgcaataaaatgcatttgaaacgcccccatatatactaacaatacaaatattataacataatttaaaatccaattaagtacgatgcttaaataaattataatctttctaatttacttttgagtttttgacaaaatgatgaacgttgaaaaatgttatcaattgtgtactaattaaaagtttcgtgcttacattatttttaaaatttttgtataagttttgacgtacaaaaactatgaaatatacggttcaattaaattccatatttgttgttgtttattattttgaattgatgaataacttacaattgtatcgtctgggtccatatctaattgtgtcttaatatttttaatatgcttttgaaccttaccttttggaattttgtcttctttagtgcatataactaaagtaggaatatcaaaatgtttcaaataattgtacattaagatatcatcttgtgttggatcatgtcttaaatcaactaattgaataactaattgcaaattctctctcttagttatatattcctcaatcattttcccaaatttttcacgttgtgttttacttactttagcatatccataccctggaacatccacaaaaataagttgttcatctatattataaaaatttaacgtttgcgttttgccgggttgctgtgatgtacgtgccatattttttctgccaatcatactattgataaatgtagacttacctacattagatcgaccgctcagtgcaacttcagacaattctgtttctggatattgttcttcttttactgcactaatgattaattctatattattaggattaactttcattttatatcctcacttttttatattctctttcaattctaccattatataatatttgaacctttcggtatacattataaaaaagctccgatcaaagttaaactatttgagcgtcaactttgattggagcttttcacttttataacacatcaatgattaagctgatgttttactattattaattaaattgccttctgcgtcgtatagttctggttcagtttcttcattaattgtttgtgctgtaataactaccttcgttacattttcgttagaaggcacatcaaacataatatcgattaacgattcttctatgattgaacgtaaaccacgcgcacctgtttttctttcaattgctttttcactaattgctgataaagcttcttcagtgaactctaaatccacatcatctaattccagcattttagtatattgtttcacaagtgcatttttaggttgcgttaagatgtttttcaacgcagttacatctaatgtttctaaattagctacaattggcacacgtccgataaattcaggaatcaaaccataggcttgcaaatcttctgggcgaatttgtgctaataatgcttgttcgtcatatttatcagcttcattgcttgagaaaccaataactttttcaccaagacggcgcttaatcacttcttcaataccatcaaaggcaccaccaagaataaataagatatttgttgtatcaatttgaatcatttcttggtttggatgtttgcgtccaccttgtggcggaacacttgcagtcgtaccttctaagattttaagcaatgcttgttgaacaccttcacctgaaacgtcacgtgttatagatgtgttttcagatttacgtgcaattttatcaatttcatctacataaataatacctttttcggctttatcaatgtcaaagtcagctgcttgaattaatctcaacaagatattttcaacatcatcgcctacataaccagcttcagttaaacttgtcgcatctgcaattgcaaatggtacattcaacgtcttggctaaggtttgagctaataatgttttaccactacctgttggcccaattaatgcaatgttacttttttgtaattcaacatcatcttcttttggtcctaattgttgaatacgcttatagtggttataaacagctacagctaaagattttttagctttttcttgaccaataacatattcgtttaaatgatccataatttctttaggagtaggtaattctgtcatcgcttcagaagtgttttgagctaattcttcttcgacgatttctgagcataattcaatacactcattacaaatatatacaccacttcctgctacaagtttttttacttgatcttggtcttttccgcagaaagagcatttcaaattttcttcatcttcattgaatttaaacattctttttacacccctattcgttaaagactatactagattggatgttacaatgcaacatattaacatacaaactttttgcttaaagaatagtagcagatacataagctatgcatctgctactcatttttgtaatttaatatttaatgaagattaatcttctttagttccttcaacgaactttgcgttatctcttaataaatcgataactttttggatacgaacatcatttttaatgatatcagtattacctaaagtatttttgatatcttcaactgagatattaaattgtttactcattttttctaattctttatcgatatcttcatcagtagcttcgattttttcagcttcagcgatcgcagttaaagttaagttagttttaacacgttgttctgcatcgtctttcatttgctctcttaattgagtttcatcttgacctgagatttggaagtacgtttgtaaatctaaaccttgttgttgaattctttgtgcaaattcagacaccatacgatctaattcagtattaaccattgcttcaggaatatcgattgttgtattatcagtagcttttgtaatcgcttcctctttttcaacattttcagcatctgtagctttttgttcagctaaacgtttacgtaagttttctttgtactcgtctactgtatttgcttctgcatctaattcattagcaatttcatctgttaattctgggacttctttaaatttaatttcgttaacttttgttttgaaagttgcttctttaccggctaattcttcagcatggtattcttctgggaatgttacgacaacatctttttcttcgtcaactttcataccttctaattgctcttcgaaaccaggtatgaatgaacctgaaccgatttctaaatcgtaaccttcagcttgtccaccttcgaattcttctccgtcaactgaaccactaaagtcgatgttaactgtgtcgccattttcaacaacaccatcttctttaacgaccatttcagctaaatgtcctaagctgtggtcaatcgcttcttgtaactcatcatcagataattcagtttcttgtttttcaatttcaagacctttatagtctcctaatttaacttctggctcaactgtaactgttgcttcaaaaatgaaatctttacctttttcaatttgagtaacacttacttctggttgtgcaactggtttaatatcagtttcgtcaattgcttcaccataagcatctggtaataaaatgtcgatagcatcttgatataatgcttctacaccaaagcgttgttcaaaaattggacgtggcactttacctttacggaatccaggtacgttaatttgtttaaccacttttttgaatgcttgatctaacgctttgtttactttttctgcaggaacagtaacagttaataaaccttcgttaccttcctttttttcccaagttgctgtcatgtatatatacctccatgattaactaatttattttttcaacttccctattatatcataggtctattccctatacaaacattgaaatcacaacgtttatatatttgtaaatcaacttttttcgtcaaaactatattaaaatgctgagtattattttgcaacaatttaactattattattcaaatctaattgctgaataaaattaaatgcatcgatactttgtaattcacatttaagtcctaacatatttttgaaataacattcgtatgcattaatccatttattcgtttcaaacaaagtttcaatatcaattggataaatcatgatagagtgattattcataatatggtgtgcttcttcagcgatatgtaaagcaccatcatttaatgtttccataacgttaggtataactttttctttaagtgttgtatgttctagcccttttaaattagctggtacaaaagttacatccataccatacttttcaattgtcagttcttgtgtacaatttgcgaaccttaaatactcaatcattaaactaatgaggttataactgtacgtattagattttaatatatataataccgtttcttgaaattgaaaatgaccattgtctattaacttcaaaatcaagtgcgtctgttccctcattgataacgtatcaaaatcagctaatgactgagtcaatcgtttttcatcttcaattaattttgacttagcaaattctttaagaggatgtaatgccattcttgttttgtgatctttgacttcatcaataatttgatgaattacttctaccgcttcaaaatattgtcccaaaccaatcaaacttttcacgtaataaatcatcaatgcatcatattgttgtatgccagttttcaataagacaattgtttcttctcttaattcaagaaatgaccccgtctcatataacatacggcatttcatcattgctatttcttcagtgagttcaaattgacgttcatattgcacaatatattcatacatcaggtcatagttttggtcttgttcagcacgttttatatctttatataactttttcgaagagttaggaaactgaataatatctgacatatatgtcacctcgtttgattataaatcttgaaggattaatgcactccacgtttcgaaatcatcatatgactctatgttgcctttttcaacccattttattcgtaaagtatctgtttctttagcttctacatcattcgtacttacagtgattttaaatacaacaccaatatgtaccttgcccacttcattattatcgtcattaataaaaccgatatattccatattttgtgaatcttgctcacttaaacctacttcttcttctaattctctctgtgcattaactctcaatacttcgttaatagattctgctcctggaacatcattcatatgaccgcctacacctattgaagattgtccatgcaatcgagcttctccaccgccagataatcgttcatacactaatatctcgccatgctcattttcaagtaaacaataagaaatgagttgtttatatgatggatcctcttccatatcgccgcgtcgcttaacttcatattgacttagcgcatcaaaaatattttgaccttctggtttattcttatttaaaaacccattgaaagtattcttttcattattaaaaataatttctctaggtactacaatgatttgttcatcaaatttagacatcgtataaaactcctcactttaatgtttgttctcttaaatgcattttagcaaatatgtcatattttagcgattaaatgtggcattttgctatttaaaaaataaaaaagagatgacaatgccatctcttttttataagtgttattattttaaagcatctttagctttagttactaattgagcaaatgctttttcgtcagaaattgcgatttctgataacattttacggttaatgtcgataccagcttttttcaaaccgttcattaaacgtgagtagctcatttcatgttgacgagctgctgcgttgatacgtgtaatccataatttacggaagtcacgtttacgttgacgacggtcacggaaagcatattgacctgatttcattacttgttgcttagctactttgtataatgtatgttttgaaccgaagtaacctttagctaatttaatcgtttttttacgacgcgctcttgttactgttccacctttaactcgtggcataaaaaattcctccttaggtaattcctaccgatttctgtatttgttcttattttttgtatgctaataattgttttacacgtttcatatcgctcttagacactaatctagctttacgtaattgacgtttttgtttagtgctcttgtttgcgaataagtgagatgtgaaagctcttgaacgttttaattgacctgaagcagttcttttaacacgtttagctgctccgcggtgagttttcatttttggcataatataagtcctcctgtaatagctttaattatttttcagctgttggcgctaacatgataaacatttgacgcccgtccattttaggtttttgttcaactgttgctatatctttgcattcatctgcatatttttctagcacacgttgaccaatttccttatgcgtaatggcacgccctctgaaacgaatagatactttacatttatcgcctttagttaagaatttacgtccgtttttcaacttcgtttggaaatcatgttcctcaattgttggacttaaacgaatttctttaacattgataattttttgtttctttttcatttctttttcttttttctgttgttcgaatttgaatttaccgtaatccataattcttgcaactggtggtttcgcattcggtgcaacgaccactaagtctaaatctacacgttcagccatttctaaagcttcacgctttgatttaacaccaatttgttcaccatcttgaccgattaaacgtaattcttttgcacgaattttgtcattgatttgagtttgatcttttgctatggttgacacctccaaaatttttacgaaatttgcaccaagcaaaaaggaagagcaggtataaaatacccgctcttccttatacacagttatgtgtaatgtgattaacctgccaactgctttatgcgtcgctacaggtgagaagcgggtgcttctacttggttcgtttcgtattcaacgttattaatcatatcaacaattcacatttaagtcaacactataactgtaattatttttattttaaccttttatttcatccattgacacgtcttgacgtaaatctacttgttctaatggaatttttttcgttttatatcgaagcttatgataaataaagaatgctaaaaatactggaattcccatatacgtaattaagaagcgactaaaattaaaatctcctgttttaataaagtcaacatcttgaccaataattactacaatacataaaaagccagcaaataatggtccgaatgggaataatttagcagtatattttaatttagatttgtcataattttgtttatcaaatgctcttctaaatcgataatgacttactgctatacctacccaagcaataaaaccagttaaaccacttgctgcaacgatatattcgtatgcaccttttgtaaggctttgtaatacgaaaattatcactacaatgattgctgtaacgagtaacgacatatatggcacaccgtttttatttgttttaccaaatgcttcaaacgctaatttatctttactcattgaatatagcattcgagttgaagcatacatacctgagttacctgctgataacacagacgttaaaatgactgcattcataaatgatgctgcaaacgcaaatccagcatttttaaacactaatgtgaatggagacgttgctatattatcactaccccccattaatgcactactatcataaggaattaacataccgataacaaaaatggctaaaatgtaaaataataaaattctccagaatacttgtttaattgctttcggcacagcacgttcaggattttctgattcaccagccgtaataccaattaactcagtaccttggaatgagaaaccagcgattaagaatacacctagaattgataacaaacttcctcctaagttgccaccaagaattggaccttcacctttattaaatatttcgaatcctacaacatgaccacccatgattccgacaatcgttaataaaccaattgcaatgaaaacaataactgtaaccacttttatcaatgccaaccagtattcactttcaccatagacgcgaactgataacgaattcagactaaaaattataactaagaacaacgcactccatgcccaagcgggtatgccttgcaatggtgtccaatattgaatgacttgtgctgcaatcgtaatatctgctgctacagtcactacccagttaaaccaatagttccaaccaagcgcaaaccctaaagatggatcaacaaatcttgtagcatatgtactaaatgaacctgatactggcaaatacgtagccatttcgccaagtgacgtcattaagaaaaataccattattccgataattgcgtatcctattaatgcacccaaagcacctgcatcatgaattgctccaccagaagttacaaataaacctgtaccaatacaacccccaatcgcaatcatagaaatatgacgatctttaagtccccttttgacaacattgttactttcattttgaacttttgacatataagctccctttccatgttttagaggccaagaaataaataacctttattcactttcatacccttttttacagaacatagtgatattaaaagtaaaaaaagtggctacatacctttaagatatgcaaccactttggcaattatctatataaggtagcacatcacattctgtgacagtacagttcctattcgaaaactgtcccaatagatataatttatggtttatatctatttcggcatctttacctttcacttgttcaacttatgtaccataaatacttctgacaagttactaattaaacatgcaacctctaactcaatttaatattttaactaacttgtaatatacaggattcatcacgcataatcaaccctgtaaaacttgatacgcaataaaagttttaaagcattttattgcgacaactgtctatctatgttttttcaaacgaatttcatcaactagattccagataaattcatctttttcaactgtttcttggtcttgcgatccatattgacgcacattcacttgattattttcaacttccttatccccaactacgatttgataaggtattttttgcatttgagcttctctgattttataacccattttttcattacggtcatcaatacttacacgaacgccttgagatttcaattcatcttgtaattggcgcgcataatcataatgtaaatcaacgttaactggaatgatttgaacttgttttggcgctaaccaagttgggaatgcacctttagtttcttcagttaaaaatgctacaaatcgttccattgttgatacaacaccacgatgaataacaactggacgatgatgttcaccatcttgaccaatataagttaaatcaaaacgttctggtaataagaaatcaagttgtgctgttgataatgtctcttctttacccatcgctgttttaacttgaacatctagtttcggaccatagaatgccgcttcaccaatcgcttcttcgtacgataagccaagctcatccgctgcctctttaagcatattttcagctttattccacatatcatcatcatcaaagtacttttctttatcttcagggtctctataacttaatctaaagctataatcctcgaaaccaaagtctttatacacatcaataatcatgtttacaacgcgtttgaattcttctttaatttgatcaggtcgaacaaagatatgtgaatcatttaaagtcataccacgaacacgttgtaatcctgatacagcaccacttgcttcatatctatgcatcgttcctagctcagcgatacggataggtaattcacgatatgaatgtggtttattcgcataaatcatcatatgatgtggacagttcattggacgtaataccatagattcagtttcatctaactgcattggtgggaacatatcttcttgatagtgatcccagtgaccagatgttttgtataaatcaacattagcaagtactggtgtataaacgtggtcatatcccatgctaacttctttatcaacaatgtaacgttcaatttcacgtctaattgttgcaccgttaggtaaccataatggcaaaccagcaccaactaattggctatttgtgaatagttctaactctttaccaattttacgatgatcacgttctttacgctcttctaacatttgtaaatgtgctttcaattcttttttatcaaagaaagcagtaccgtatatacgttgtaacattttgttgttactatctccacgccagtatgcacctgctgtagataatagtttaaactctttaattttagctgttgatggaacgtgaactccacgacataaatcagtaaaatcaccttgactatataatgttacattttcatcttcaggaatcgcgtcgattaattctaatttgtattcatcattgctgaataactctttcgcttcatctcgtgaaaccacttttcgttcgattttcatattttcgttaacgatttgtttcattgttttttcaatttgttcaaagtcatcagatgagatgttttggtcaatgtcgaagtcatagtagaatccaccttctattacaggacctacaccaaatttaacattaccatataaccttttaatcgcgtgtgccattaaatgtgcagtagaatgacgtaatacctctaacgcttcttcactacctggtgtcacaatttcaattgatccatcagtttcaagcggtttagttaaatctacaagttgcccgttaaatttgccggcaacagcttttttacgtaatccaggactaattgattgtgctatatcttcagtagtagtacctttatcaaacgcctttttattaccatctggaaattgaatattaatttgttccatgttaaaccctcctatttgctttataaatacttttatctgacctcgttaaaaaattgaacaacaatcatcgttttaacattaaacctattaacaataaacagggaatttatgacaccaacaaacatttatgtctgaaaaaaacaaaaaatcccgcccctatacaagggacgagatcgtcgtggtaccaccctagttatctaatacaatttatgtattaaatatctctgcttaagataacggtcttgatccgggtattcattacaaataccataaatgaagtagtaatcatctaatttattaaccatattctcatcaaacaatggctttctgtgtaatattgattagatcatcttgtcttcaatcatttaaacgatttagatttgtattcattatacaccaatcattttaaaattcaattgtttctgaaattttctcctgataaaaagtatggtgttgacaaagatttgacacgttcaataatacgtgctgctttagtcttctcttcaccatcacgagtcatcgctaaatgatgttccaattcactatagtcaaaattagaactaaagaatgttggtaattcatgaaccattcgataatgtagcaaaggtccaattacctcatctctcacccatggagtcacttcttcagccccaatatcatcaagcattaaaatgtttgcttctcttacgcgatgtaatttcttttcaaaagaaccatctttaaagccaccttttaatgttctaataaattccggtaaataaataattgtcgaacgtaccttcttagatttgagctgattcgcaattgcacctagaataaaagatttacctgtcccaaatggaccataaaggtaaaggcctttcacttgttccccattagttattgctgtacaaatatcatctgctgccatagctacatcaagacggtctcgatgattcatataaatatctttcaatttggcatttaaagtatctcgttgcatatgatgagatgtaattagctcagcttcaaagcgttcttcgtcgtacttgattttacatgggcattgtaaatagcgtattttaattcggttattatcaacatataactcaggcacatgcccctttacgaaatttggacaatcagcaaatttatgaccgtcataatgtttttgttgatctttatactcttgtaacacatttaagtcttcatcaatcatagcattcgttaattcagctcgatgcgcttccaaaaattgcttaacatctgggtcattgattacttctttttttatcttttctattcttttttcaaagtcctgcgacgtgttaattatacttttaaattgcttcattattgactgtcctcctcccattttttagataatttatctagaaatgcttgtcgatcttgctctaattgttgatcatctacgctattatctttagccgaatcttcttcactaggtttatctctattttctaaccatttaggtgttttttcttttgaaatacgattacgctgcccatagtatgaaccacgcttttggtaatttccgctagaaccctcatttttaggttgattaacttttttagcgtaattatatgcttctttagctgtcttaataccttttttcttccaatttgatgctatttccaaaatatacgctttaggaagtttcatatcttcttttaacatgacaaattgcaacaaaatattaatgacgccaaaagacattttttcacgttcaattaattcttcaaccattgtcttttgcgatatagttggttctgattcagaccaagaagctaacatatcaattggactcgtttgttcaagtaactcaaaccattcatcactttgtggctttggattcacttctgaagatttgcccgccgaagatgatgtagcaggagatttcacctgtaatttaggcatttgattttcgtgttccattaagtaatacgagcgtgcttgtttacgcatttcttcaaaggataactgttgtccacttgtaattgaatttaaaataacatgcttcatgccatctgctgttaaaccatataaagtcgcgagttgtgtaattaaacgctttgcatctttggtaacaatgtcttgactaataaaatgtttacctaacatttgtctcaacatttcaaagtcaaaagattcatttgataaatcgataccttggtacggttcattaatcggaatatcacttgtatcgatatctatttttgtagacggcactttaaaaacatcagtaaattgtcttgttacctgtttaaattcactcaaatcaatttgttgatactcaaagtatttcttcaactcatgaaatcgacgatgctcgacttcactatataaaaagattgacaacattggatcattaaaaaataaatgtgctgaaggcggttgaattaattggtaaacaaattgtgtttcttgttcatcatgtttgacaaacgcctttaacaatccaatcgcttcaagtaagtccatttgttgtctaaactctagtaaattaattttaagttcattcataaaaatataatgagaaagaatcaatgtttcattatgactttctttaacgaattgagtcataaaatgatataaacccactgcttgcgttccaattagcggtgtatacagtcgattcaatacctctaaatgattcgtatttaaatcaaagtgttgcataactttgaattgatcctttggtcttaagccgaattcgaaggcttgtcgtcccatttaagcatcactccgtttgttttcgcttaaaatcccttgcatcgatgctaacaattgatcaacatctttaaattctttatagactgatgcaaatctaacatatgaaacttgatcaacatgcattaacaagttcataacgtgttcacctatatctcgtgaagacacttccgtatgaccttcatctcgtaattgccattcaaccttgttagttatgtcttcaagttgttgatatctaactggtcgtttctcacaagaacgcacaagtccattaagtatcttttctcttgaaaactgctctcttgtgccatcttttttcacaactataagctgactaacttcgatatgttcaaatgtagtgaaacgtgttccacaattttcacattctcttcgtcttcgaatggcatttaattcatcggcatgccttgaatctacaactttagattgtgtagaattacatttcgggcatttcattacatcaccctctttattttgattatgcctaattatactataaatctagagatgaaaaaagaatccctcaatttaattcatttaaccaaataatgaaacaataaaaaacattatatcgttacttattaagtaatttgcatgacaatattattgtattaaaaataaaaaacctaactccgaagtcagagttaggctataaattaattgtattaacttgcacttacagtttcttttgatgtcaaaagtgctccaatttgctcagcaacatctacaactctatttgaataaccccattcattatcataccaagcaataacttttactttattccctgacatgaccattgttgattttgcatcaataatagctgaatttggattagtattaaaatcaacagacactagtggttgatgttcgacttctatgataccttctaaacctgcattttcaaaagcttggtttacttcttctgcagttacttctttttctaaatcaacaactaaatcaacgagcgatacattctttgttggtacacgtaatgccatgccgtgtaatttaccttctaattctggtaatacttcttttaaagctttcgccgcaccagtagaagtaggaataatgctttcattacatgaacgtgcacgtcttaaatctttatgtggattatcaatatttttttggtcatttgtaatagcgtgaacagtagtcattaaaccattaactattccaaactgattatttaaaacttttgcaactggaccaatgcaattagtagtacatgaagcattactaaaaatgtcaaatgcttctatatctaattggttatcatttacgcctttaactaccatttgaacatgtccaccttttgaaggaccagttaacaaaacttttttggcacctgctttaatatgtgcgatggctttatcaccatgattaaatttaccagttgcatctatagcaatatcgatatctaattctttccatggcaagttttcaggattgcgatcagcaaccaatttaattttatgatttccaacttgcaatccattttcaatcggttcaacttttagattatattttccatgtgtcgtatcgtaattgattaaatgtgcaattgtttcgggtggataactagcatttatcgctactacatttaaatttttattttgtaatgcaatacgtaataccattcttccaattctacccataccattaattgcaatattcgttgacattaaaagcaccccttgatctttatgtgttatactttatggaattagtatagcatattatatgaaatttgaaagcgttttccgttgatttatttatcttttttataaaaaatagtcattacttacatacatcaacgcgtacgtaaagtaatgacttatttatagtgtaatattaatcttcttctccgtaattcggcttttcaatataaccttcttcttctaacaatctctcaaggttttgttttaattcaagtttatcccctaaattatcgataacatgatcggccattcggctttttttatcaatagaaatttggctatagacacgtgctttcgcatcttctaatgacaaattattacgttgcattaaacgatccatttgtatactttcagaagtgtatacaacccacacttcgtctactgtattttccaattcattttcaaataataatggaatatccatgattacattatatccttgttttaaatattcttgcttttcttcttccataatatctcgcacgataggatgtatgatagcatttaattctaagcgtttttctggatgattaaacactagatcacccatataacgacgattcatctcaccattttcatcaattgcttcatcaccaaagacttctcgtacttgagctaaacctttactcccctttttaacagcttccctggctgctttatcagcatctactactttaaaaccgaatacggataagagttctgatactgttgattttcctgaggcgattccacctgttagaccaataactttcggcataatttcactctttctttatttttgacatactggacaataatgactatttcttgtcgcgatgatttttgtttcaatttgacttccacacactttgcataccggctgcttatatacattaaggtgcaattgcatctcaccagtttttccatcagcatgacgataatctgaaatacttgtaccgccatatttaataccttcttctagtacttctctaacataataaaaaaccatttcttgttgttggtgtgttaagtcttttacttttttatctggtaaaacacctgcacgaaacaacgcttcacatgcgtaaatatttccacaacctgcgattactttatgatccaaaatcacttgtttgattggtttattcttattagactgttgatgaattcgatttaaataatacgtcaatgcttcatttgaaaaaggttcaggcgctatttctaaaaatgaaggataagatgctacagacgcaacatttctaatttctccaaaacgacgtatatctgaataaattaactttttgtcatttgacaactcaaaaataacatgccaatgcttacgataattaggtatcataatatcttcaagttcatctacaatgaaaaaaccgcccgccatacctaaatgactaattaatgtacgttgttctcgtttattatctagctgaaaaacgatatatttacttcttcgttctacatttgtaatggtatagccttccgataaagttttaaaagtatctaattcaattccttttataattgtttccttgccttgagctttaccttcgattactttatccgaaaatataacgtgttcaattttttgatttataacgtagggttcaattcctctttttacatgttctacttctggtaattcgggcataccattaacctcactttattttgcatcataccaggttgcaccataacttgagtctacttttaatggaacatctaattgcaatgcattttccattatctcttctacaaattcactaaatgaatctacttctgacttaggtacttcaaaaattaattcatcgtgtacttgtaataatagtttagcttgatatgttgtctctttcattttttgagcaaatttaaccattgccagtttaatgatatctgcagcactgccctgtattggcgtattcatagcagtacgttcagcaaagccgcgtaaattaaagttacgactcgtaatatcaggaatatagcgtcgacgatgtagcaatgtttccacgtaacctaaagctttggcatcttttacaatatcagacatatattgttttacacctgggaaactagctaaataatcatcaatgaatgcttttgcttttttacgagtaatacctaaactttgacttaaaccataatcacttatcccataaacaattccaaagttaactgcttttgcttgacgacgcattaaactatcgacttgatcagcttctacaccaaatactttcatagcagttgctgtatgaatatcatcgccgttgataaatgcttctttcatactctcatcttgtgtaatgtgtgctaatacacgcaattcaatttgagaataatctgctgataatataacgctatcttttgaagttggtttaaaggcttttcttattttacgcccttcttcaagtctaaccggaatattttgtaaattaggatctacacttgataaacgtccagtttgcgctaaagtttgattaaaacgtgtatggatacgttgatcatcactaattaccttttgcaatccttcaacataagtagactgtaacttagataattgacgatattctaaaatataatcaatgataggatgttcaccttgcaattgctctaagacatctacagcagtagaatatcctgttttcgtctttttaataacaggtaattgtaatgtctcaaacaatacaacacctaattgcttaggagaatttatattaaaatcttcaccagctgcatcatggatatttcgaatcaagacgtctaatttttcttgaatttctttttccatttcttctaaatcatgaacatctgtaaatataccaatttcttccatttcacttaaaatcttagctagcggtagctctaaatcagccaagagttctacctgattgtattcttctaattgtttatccatatttggtttcgcaaagtaaattgcatcagtaatagaagcaacatatggatttaaaacatcatcttcaggtaccttaaatttcttaccttttccatatatactcacatcgtctttcacaaaactttgaccgtacaatgaaacaactgattgaacatcactaatcgtacgagatggatcaattatataactggccaacataatatcgaaagaaatattttgaatatcaatccccaatctatgtgatgctacatatgtttttttagcatcatatacgacttttttcgaattcggattttctaaccatgaaactagttcgacataattatttatgtcatccgcattaattacaatatgtttctcacctgtaaataaagagaattttaaaatattatttcgcaaatagttaccaccgtctaattcgaaatggatggccgcttctttcaatgaagtaaaatcaatattatcaaaagacgtttcaatttcaaatgtcttttctattgcatcttcaacgcttgctgattgatcaatgtcagccaacaattgtttgaattctaacttcttaaacaattcgattttttcttgttgttcatcttgatgagtcattaacgtatcttcaagttttacttcaatcggactatctacattaatcgttgctaattctttactcattaatgcatcttctttgctattttgaagtttttcttttaactttttacctgaaatttcatctaaatgttcatagacaccttctactgtgtcaaattggtttagcaattttattgctgttttctctccaacacctgcaacacctggtatattatcagaagtatctcccattaatcctttcatatcaataatttgattaggtgttaacccgttgtatttttccgcaataaagtcaggtgtataatgatcaacatcagtaacaccttttttagtgtaataaatggttacattatccgttgcaagttgtgttaaatctcggtctcccgtaataataattgtctgaaagcccgctttatctgcttctttacttaaagttccgataatatcatctgcctcatagttatctaattcataacgtttaatatgataagcatctaataattggcgaatataaggaaattgctcacttagttcaggcggcgttttctggcgtccacctttatattcactatatttttcatgtctgaaagtcgttttacctgcatcaaacgctactaaaaaatgatttggcttttcttcttttaaaatcttctctagtaacattgcaaaaccatatactgcattggtatgaatgcctgctttgtttgataagaaaggtaatgcataaaaagctctaaaacttaagctattaccatcgattaatactaatttattcacaattttaacctccagaactaatttatatatattttagcatattcgactgtgatgtcgtaattaaagaaactatctcatagagtatttatacacgacctaatttcaaataaaacaagtgcctatatagacttagctaaaaaataaaaaagacataatcatgattgttcttgatgagcactccataaagtcaggttaaaagtccaacttttgagatgcacattatcatttcatgattatgtctactttttaatatttttatgctgctattttaaatttttataggtaagaataagttatgaatcgtctgaaccaaatggaatatatttaactttggtcattttcggtaattcttcataattattaaaccactcttggtaatttttattgattggtgacggatgatgcatataatgttcaaacggcaatgattccactgtataaacctcttgtcgtggatgatctttaatttgttgttttaataactgaactcttttttcatgttcataatgaacataaataaatgcactaagatatatcacagctaaaactagtgatgcacctttaataaaattaacattgattgacttatatttccgaaattcttttaataaaataattaaaatgattacatgtatcgtataaacaatcaaaaaattacctggttctattggagtaacaatgactagtgtcgacgccgaaacacatattgcaataagtaaggaatataaagtgatttgtgttttacgatcattaatagacaaataaatacctacaaatatcgaaaacgcaaagtaaccacatacaattacgttcacaaaaccaaccaatccaatatctgtatttttatttaataaaaactgattgtaaaatagtaaataataaagcggtaaagtgataaatcctatcataatgatacgacgctttaatattgttaaatgtacataccgatcacttctaagcagtagataaataataagcgctgcaatcatacttaaaattataatctgactgaaaatgacaccatatggaagtgacgttgatatcatttctgcaaattttgaaaagataccttgattatttgaaacttgttgatattctgatccttcaaataaaattttgcgatcatttggattggaaaacataatgattgtacctatagtagcaatcataaatgaaaacaataatttataattaagtgttcgatttgcagtaaattcatacagaaaagctaaaattaaaatgatacagtggaataatgtcacattctccataaataattgaccgaagaagcataaaacatagaatagtacagtaacacttaccggctgcttttctttatatataattgcattaatacaataataaataataaagagtgaaattagtgttgatgtcgcataattataaaatcctgcaaaccagccatatgtatctgcataaatagcacttggtaaaattaacattaaagaaaatgctaacaaataatagcttgtccacgctttacaacgtgtaatgtgcataatcatccaaatgatgcccatactaatgaggccatatgaaagccaacgtaaccagcttacatgtacagctataatttcaaagatatttccgatatagcgaccattaagtgatgcaaatcctacttttaaaatatcagtattataattgctaaaccattgtaaatcatcgtgcatgagtggtagtaagatacccataaaagtataaaacaataatatcgcaattaatatcaaagttgtcttgtgtaattgaattgttttcactttgctaatcctcaaatctagttaaattttcctcaacttgtaggtcgaaaaattaattcaatatttttaatgtatttctaattttcacctatgcatgtttcctcaatcaaattagataaacaaggtatttaatattactttcaacaatttatctaaatcgcccctcgtctttttctatgacgaatgattacacttgtctattcaagtgtttaaattaagatttatttccgttcaaataaaacttattactttttaattaagcatctatttcaagcgcgttactaaaatttctttattataataaatatattataaaattgcttgattcacaacaatctattacttataacttacaaatcgacatatacaaatgacaaaattgacaaccgaatttattccacttcattaactctaatttaataccaatagagatttgaacgaaataaaaaagcagcaacaacttcgtgaaaaatacacgcgctgttaccactttaatttttattctttataatcttttagaataactttgaacgttgagcctttgccaacttgactattcacttcaatattgccttggtgggcctctactatatgctttgtaattgataatccaagacctgtcccaccagaatctctacttcgtgctttatctactctataaaatctttcaaaaatacgttgttggtcttctaatttaatacctataccaaaatcttgtacttcgaaaatgacacgaaagtcatctcgatacacacgaacgttaatatctccatcttcataagaatagttaattgcattcgttaacaaattcgtgataacttgagcaattttactttcttgtgctttaacaatgacatctttttcaatatcagtatgaatggaaatatttttttgattggcttgagtcatcatattatcaataatacgccgcgttaaatctgataaattcatatagtctgtatctaactctgtatgttgctcaatatgcgataaatctaacagatctgttactaaagattctattcgatttgattcttttaaaattatgtttaaaaacatgtctaatgattccgcatcattttttgcaccatcaataagcgtttcagcaaaccccttaattgaagtaataggtgtttttaattcatgtgaaacatttgctacaaattcacgtcttagattttcaagttgtttcagatttgttatatcatgcatcacaactaaaatcccttgcaaacttttttgagacctagttaaaatcggaacgcatgaaatatcaaagtacttggcatggacttggtttattgcaacttccaattgttcataaataggtttttcaactttaaaactttctaaaattaattgctcaatttcagtattaacatagccgtgatagcctacttgttcaatattatgcgagatgttgaactgttcataatacgctttatttgcaacaacgatttttccatttcgatctatcattaaaatagcacttggaatattttcaatcgttgtttttaaacggttggattgaattttttgctcattattaagcttttgaaggcgtcgtgctaaatcattggtagacacaaaaagcgctttagtttctacaacattactttcaggtacacgtatgtgataataaccatttgccaacaattgtgttgcataagtaacttcttgaatgggacggattaatgtacgcttaaaactacggcttgcaaaatacagacaaatgagtacaactaaacatgtcaaaataagatatttccacaacgtccaatgcatttctgtaatatcgttattgtaacctttaatccatacatgataaccgttaaccttcttattaaaaataaaaacgtcccttttttgaatatagctatcactatttgggatagctttcagtttgccactactaaacacctttttatcatgcttagttatcaataaatctatattttgctgttttacaatttttttaactttatcaatctcattatcttggactaaataaatatatgatcttgcatctgttgctagagcttgttcgtgtttttctgataaaacatatgtgatggaagcgtgaataataatgcctaatgtaacaaaactgataattaatatactgcttatcaataacattaagcggtggtgaaacttcatcattgttctttaggtctttccaatttatagcctaagccacgcacagttttaataagttgtggcttcttaggattatcttctaatttatctcttaaatgactgatatgtacatcaacaattcttgagtctcctgcaaattcataattccataccgtatttaacatatgctctctcgtaatgactctgccttgtctttctatcaaataaagcaagagttcaaattctttcggtgttagctccaataactcattatgcttatatacttcaaaataatcgggtctaatacgtatcgatccgatggtaatatcatcgtcaatctcttctacttcttttacaaattgagaacgtcttaaaatggctttcacacgggcaacaacttctctaggtgaaaaaggcttagtcatatagtcatcggcacctaattctaaacctaatacccgatcaaattcatcatttttcgccgttaacattaatatagggactaaatttttatttgttcttacagtcttacatacgtcaatgccatcttttttaggtagcataacatctaaaataattaaatctggctgttcactttctaccttttctaaagcctcatcaccatcaaatgcgacaacaacttcataaccagctgtttctaagttatatttaagtaatgttacgattgaatgttcgtcatctactaccaacactttttgcgacatggtatgcctccctaacttataattatatttacattataaccgaactatttataaaaataacatcctacacattatctttacacattttttacattactttacatataaataaaatacttcttatatttccttctatcatttgcatgacttactctgggacaacgaaataaattttgtaaaaatagcatttctatcccactacctatgcatgagttttactcatttattcctaagcttatgtacatattcgctttgtctaatgtgtaagaaacactacataatcaatcattggtgactctttattatttctatcctgttgccaacttcaattcatttaaaaaggcgaacctagcaattaaagttgctagactcacctaattttattttgcttattttaaatttttaatcaattcatctgcaaatgctgatgtagaaacttcttcagcaccatccattaaacgggcaaagtcataagtaacaacttttgaagcaattgtatcttcaattgaatctgtaatcttatctgccgcttcttgccatcctaaatgttctaacattaatacagaacttaaaattactgaagatggattcactttatttaaacctgcatattttggagctgtaccatgtgttgcttcaaaaatagcatgacctgtttcataattaatgtttgcacctggcgcaataccaataccaccaacttgtgcagctaaagcatctgaaatatagtcaccattcaagttcatagttgctacaacatcatgctcagctggacgagttaaaatttgttgtaagaaaatgtcagcaatagaatctttaatgataatcttgccttctttttcagctttttcttgagcagcattagcagcatctctgccttcattttcaacaatttcgtcatattgttgccaagtgaatacttgatcaccaaattcagataatgctaaatcgtaaccccactgcttaaatgagccttctgtaaatttcataatattacctttatgaactaaagtaactgatttacggttattatcgatagcatattgtatagctgctctaactaatcgctcagttccttctttagaaactggtttaataccaatacctgaagtttctgggaatcgaatgtttgtcgcacccatttcgttttgtaagaagtcaattacctttttaacttctgttgtaccttctttaaattcaataccagcataaatgtcttcagtattttcacggaaaataaccatatcaacatcttgtggacgtttaacaggtgatggtactcctttaaaccaacgtaccggtcttaagcaagtaaataaatctaattcttggcgtaaagccacatttaatgatctaataccaccaccaattggtgttgttaaaggtcctttaacagcaattaaatattctttaattgtatcaagtgtttcttgaggtaaccattcaccagttgtatcaaatgctttttggccagctagcacttctttccattcaatgcgtttttcgccattataggctttctcaacagcagcatctataactcggcttgctgccttccaaatatccggtccaattccatcaccgataataaatgggataattggttcattaggtacgtttaatccttcagttccttgagtaattttttctgcagtcatagttattttacctccaaattttacatcttcatttttaatttgtattgattattttctttcttcaagcgggatatacttacgattcgtttcgccaatatatttcgctctaggacgcataattctattatctttatattgttctaaaatatgagcaatccatcctgcagaacgacttacagcaaagattggcgtgaataagtcatgaggtatttccatacagtgataaacactcgcactataaaaatcaacattaggaattaatcctttttcttctgccatacgtttttccattttcactgacatttcaaataattcttcacgaccagcgtctttcgtaatttgacggctcatttctcttaaatatttcgctctaggatcaccatctttatatacacgatgaccgaagcccattactttatctttattagcaaatttttcatctaagtaagcatcaacattttcaattgacccaatctcagataacatcgtcataacttgttcgtttgcaccaccatgtaatggccctttcagagaacctacggctgctacaatacctgagtacatatctgacaatgatgataccgcacaacgtgccgtaaatgcagatgcgttcaactcatgatcagcgtgtaaaataagtgctttattgaaggcttctacttctatatctgttggtaattccccacgtaacatatataggaagtttgccgcataacttaagtcaggattaggcttaagtggttctttatcttgtcttactcgagcaaacgctgtaactaatgatgctactttagcctgtatacgcattgctctttcataacgattttcatctgattcattttcagcatcaggatcgaaatgtgcaatatatgataatgacgtacgtaatgctgtcattggatgcacgtgatctgtaacatactcctcaaaatgtgtatacacacgaggatttaatgtcatgtattgatttaatttcccttttagatgagcaagctcttcttcgtttggcaatctatagttccataataggaaaataacttcttcaaattgcgcattttcagctagatcatcaatatcatagccggcataagtcaattgactttcaataattgaacttattttagtctccgctgcgataaccccttctaaacctctttgtaattctgccatgataaatttcccctttactgtttctttatgaaatggctttcaactaatattatagctaaacgcatttcgtttgtgaaatataaaaactggcattatatgtgcaacaatttttttgtaaatctatgtaaatgtcacagaatagccacaaatagcaccattaaagctttttcaagatgtgaataatccatgaattttacaatagaattaaattttcaattggttattatatatgattataaaaaccaaagtatattaacatggaattttacacatttttaccgaaaataattgtatatatctcaatataagtgcataataaacatatctatatttaagggagatgtattatggctgaaaaattacaaagggaactgagcaatcgccacatacaattaattgcaattggcggtgcaattggtacaggcttattcttaggtgctggtcaaacgattgcattaaccggcccttcaattctattaacatacatcattataggatttatgttatttatgtttatgcgaggtttaggagaaatcattatacagaatactgaatttaaatctttcgcagatgtaaccaatacatatattgggccttttgcaggatttgttaccggatggacatactggttctgttggattattacaggtatggctgaagtaacggctgtggcaaaatatgttagcttttggttcccagaaattccaaactggataagtgcactattttgtgtactgttattaatgtcattcaacctacttagcgcaagacttttcggagaattagaattttggttctctatcattaaaatagcgacaattattggtttaatagtagttggtttcgtcatgattctatttgcatttaaaactcaattcgggcatgccagtttcacaaatctatatgaacacggcatattcgctaaaggtgcttctggattctttatgtctttccaaatggcactattctcatttgtaggaattgaaatgattggtgttacagctggggaaacaaaagatccagttaaaacaattccaaaagcaattaacagtgtacccattagaattttaatattttacgttggggcgttagcggttatcatgtctattatcccttggcagcaagttgatcctgataacagtccattcgtaaaattattcgcattgatcggaattccgtttgctgcgggcttgattaattttgtagtattaaccgctgctgcttcatcatgtaacagtggtatattctcaaatagccgtatgcttttcggtttatcaagtcaacaacaagcacctccgaacttttctaagacgaataaatatggcgttccacatgttgcaatctttgcttcatcagcattattacttgtggcagcattactaaactatattttcccagatgcgacaaaagtatttacgtatgtgactaccatctctacagtgttatttttagttgtatggggtctgattatcattgcatatatcaattatagtcgtaaaaacccagatctacataaaaatgctacgtacaaactattaggtggcaaatatatgggctacttaatatttgtattcttcatttttgtgttcgggttattatttattaatgttgatacaagacgtgcaatttattttattccgatttggtttatacttttagcatttatgtacttaagatataaacgtatcgctgctaaatcaaataaataacaacaagttttagggcttgggacattaagttcttaggcaatgtaaaaaagctgatttctattaattatttgatagaaatcagcttttttgatatgtattttataatgtacagctcgttgagctgctattttccttatattaagtgccatcaatacaaaacctagctctcgtttaactttatttattcctcgaactgacattcgagtgaaacccaaaatagccttcataaatccaaaagcaggctctacatcaatttttctttgactatagatgtttttcgtttctggttcagaaagcttttgattaatttggactttaaagtattcccaattataattcttcatgattttcttattggatttcgaatttggtttcatgcattgatgtctcaaagaacatgctgaacagtcatcgcattcatatagtttgaagtctcgtttaaaaccatatctatcattacggtatgcatatcttttaaaacctattcttttgttattaggacatataaattcatcattaagttcgtcatatttccaattttgagtgttgaaaatgccacttttaaactttctagttttatctttaataaacatgccatacgtaataagtggcgttttattaaaatcatctataatagccatatagttttgctcactaccataacctgcatcagctacaatatactctggtaaataaccgaaggtattttgaatcattgttaaaaatgggattaatgttctagtatctgttgggttttgaaataggtcataggataaaacaaattgagaatttgtcgctatttgtaaattgtatcctggcttaagttggccatttttcatatggtcttccttcattctcataaaagttgcatcatgatcagatcagttttagaaaaactatttctatctttaagaatcgatttttgttcttcatatttattttttctttcggaataatcatcaaatttctttttgaacttcttaatctcagttctttttttacgggtctgttttctaatttgagcacaatcttcgttctcaatagaatgatttaaatcttcgatttctttatctaaatgactaccaattaaatctatttcttctattgttaaatcgctatctccatcttcttttatctctggtattattttttcttcaactaagtcacgatataatgtttttgaattttcgttcaatttcgattcgtgattttgaatacttttcttccacacaaatgtatatctattggcattagcttctacttttgtaccatcaataaaaattgaattattatcaataagattttgctttaaacattgactatggaactgaataaataaagattcaattaacgcatcagtattaggattcactctaaaacgattaatagttttataagaaggtgtttgatcttgagctaaccacatcattcgaatactgtcatgaagtaatttttctattctacgaccagaaaatacagattgagtatatgcatataagatgatttttaacatcatttttggatgataggatgttgcgccacgatgatgtctgaattcatcgaattcgctatcaggtatcgtttcaacaatttcattaacatatcgcgaaatatcattttgaggaattctaacagaggtttctattggtagtgtaagttgggtcatgttataaattttatacataaggcacctcgttaatttagtttagtggtatttattaaattatacgaagggacccaacacagaaaattcattttattgaattttacatttatgtgcaagttgggcaaagtgttttattttttaaaagtatgtaaaagtaaaattacatgttaatacgtagtattaatggcgagactcctgagggagcagtgccagtcgaagaccgaggctgagacggcaccctaggaaagcgaagccattcaatacgaagtattgtataaatagagaacagcagtaagatattttctaattgaaaattatcttactgctgtttttttagggatttatgtcccatcctgttttatatgcaacttataatattaaattgcgtacttggctcaaaacttttactttctcatctatttaataatgtatcatttcagaaatacatccatacttctattttataataaatttccaaagtaatatgagtgaaagtttgaaggtgataatgtacatgtataaaagatataaacatttatatagattgccattcatacactatcattatcaaataacctattaattacgtcataaaataccagatgaaccaaaaaacgcctttccattgttgataaatggaaagacgtttttttataaattatagtacgtttgcatatccttcaaagattttaccttgagcagcatcaatcgtaactaacatgttattgcttatgtttttaacagctttttctacacctacaactgttggaatacctttttctaaaccaacaattgcacttggtgatgtaataccattttcttctgtaattaagcctaaagctttttctacataaggtacaaacgtttcatcgattgagttagtaacgataactttgtcagataaatctttaccttctaaatctttaacagtttcagcaactaacgtagtaccaacaactgatccacgtccaataccttgaccattagcaatttcgtcaccaactaggtggattttcatcatattagtagttccagtttcaccagttggtacaccagcagtaataatgattaaatcaccattagatactctaccagtttcaacagctgttgcaactgcattgtttaacaatgcatctgtactcttacgtccttttttaactacaggttgaactccccaaacaattgaacattgacgtgcagtttcttcacttggagtcaccgcaataatgtctgaatgtggacgatatttggagatagtacgtgccgttgaaccactttcagtagcagctacaattgctttaacatttaagtttaaagctgtatgtgcaaccgaaataccgatagcattcactaatgaagtttcaactaatttagtacgatctgacaataactttttgtaatcttgggctgcttcagctgatacagcaatatttctcattgttttaacagcttcttcaggatataaaccagcagcagtttcaccagataacattactgcatctgtaccatcatagattgcgttggcaacgtcactagcttctgcacgtgtagcacgtgggttacgttgcatagaatctaacatttgtgtagctgtaataactggtttacctaatttgttacattgtctgattaaatctttttgaaccattggtactttttcaggtggaatttcaacacccatgtcaccacgtgcaaccattaaaccatcagacacttcaagaatttccgcaatattatcaataccttcttggttttcaattttagggaatactgaaatgttagctttttgttcttctaaaatttcacgaatttctaaaacatcactaggacgacgtacgaaacttgctgcaatgaagtcaacattttctttaataccgaaacggatatcttcagcatctttttctgtaataccaggtaaacttactcttacgccaggtaagttaacaccttttttgtttttaagctcaccagagtttaaaatatcacatttaacttcttttttagcatggtcaatatctttaacttgtaattcaattaagccatcatcaagtaaaatgtatgaacctacttgaacatcgttaattaagttttcatatgttactgagaacttttcaggtgttccttcaacttcattcatgctaacaataacttcgttgccacgttcaagttcaatgataccgtctttcatattatgcgtacgaatttctggaccttttgtatctaataaaattgctacaattttgtctaatcttttagctactttacgaattgtatcaattctacctttatgctcttcatgactaccatgtgaaaagtttaatcgtgcaacgttcataccagcattgattaatttctcaatcatttcttctgattctgaagctggtccaattgtacatacaattttagtttttctcattttataattcctcctgaaatcttatatagataacttgttagcaagttcatatagactataatcaaatttatgatctttaccatcaaaaatttcatcaaaagatgttgctacaattttattgttcttaattccaacacccttagctgtttcaccttgcattaataagtctaccgcatatccacctaaacgtgatgctaaaactctatccgcacctgttgggctaccaccacgttgaacgtgacctaacacagacactctattatcaacattgatgtattgtgataattctttttgacaatcttgcgcagtcatacaaccttctgctacaagaacgattgagtgtttcttaccacgtttaataccttgttcaattttatcagctatttctttaatatctgttttcacttctggaactacaattgtctcagcaccaactgataatccagcccataatgctagatctccacaatcacggcccattgcttcaatgataaatgttcgtgcgtgacttgacgcagtatctctaattttgtcgactaagccaataatcgtatttaatgctgtgtcaaatccaattgtaaaatcagtaccattgatatcattgtcaatcgtaccaggaataccgatagtttgaatttctttacattcctcactgatgcgttgtgcaccgcgataactaccgtcaccaccaataactacaaggccctcaatccctcttttacgtaagttttcgattgcaactttacgtacttcttgctccttaaactctggacatcttgctgaatacaagaatgtacctccacgctgaatcgtatccccaactgatcctaattcaagtttatgaatatcatcatttaacaatccttggtaaccatgatacacaccataaacttcaatttcattgtaaattgctgtacgaacaactgctcttacggcagcattcattccaggtgaatctccaccactagttaaaactgcaattttcttcatgacgacatacctttctataactgatttatctttaactctaaattaccacaaattgatatgtcattccatcaaaactaatgtattgaattgatgtaaacgttttaaatattgaattttattttaacttaattaaaaaaagattagtagccacaattttgactactaatcttagttaaaattcagtatctaaatattaaattattgttttaatgtacttcaatttatggtaaaacccagtatcgatttaacataaaaatgctcaagttgattattctatataagaaccgatatttctgaatttttcaaagcgatcattagcaatttcatcacgtgataatgactcaagtgaatctaactgtgcaacaaacgctgatttaatagctaaagcttgctgttcaatatctttatgtgcaccgccaagtggttcagaaatgacatcatctataatacctaattgcttaatatcatgggcagtaattttcattgtttcagctgcaattttagccaaattactgtctttccataataatgccgctgcaccttcaggagatataacagagtaagtactattctctaacatcaatactttattggcaataccaatacctagagcacctccactgccaccttcaccaatgacaatcgcaataactggtacttttaatgaagccatctcaatcaaatttgttgcgatagattcactttgtccacgttcttcagcagctttaccaggatatgcaccttttgtatctataaatgtaaagataggacgattgaatttttcagcttgtttcattaaacgtaatgcttttcgataaccttctggatgcgccataccaaaatttcgataaatattatcttttgtatcttttccacgttgttgtccaataactgtaacagcacgaccatttaaaaagccaataccaccaatcattgctggatcatctctaaaattacgatcaccatgtagttccataaacgaatcaaagatatatggaatataatctagggtcgtaggtctttcttgcaaacgcgcaatttgcacacgatcccatggttttagatttgtatatatttttttagtttctcgttccaatgacgcttcaagcatgtcaatttcttcttgtaaatccacatcatttttatcttgagattcttttaaagattcaattttatttcgaatttcaaaaagtggtttttcaaaatctaacattatttagtcacctcttgatggatttttagaatttcagacaatgtttgacgcatatcattacgatgtacaactttatccaattgtccatgctctaataaaaattctgcagtttggaaatcatctggcaatttttcgtttattgtctgttcaataactcgacgacctgcaaaacctatcaacgcttttggctcacttaaatttatatcaccaactgatgcaaaacttgcagatacaccaccagtagttggatgtgttaaatatgatatatataatagtccagcgtcagaatgacgttttaaagatacactggttttacccatttgcatcaaggaaataataccttcttgcatacgtgcaccaccacttgcagagaaaagaataaatggtaaacggttctcagtgcagtaatcaatgatgcgacatatcttttcaccgataaccgatcccatacttcccattctaaaacgtgaatccatgacagcaacgccaaatttcataccatctagttgtgctgtaccagtcacaactgcttctttaagacctgtcttttgttggtccttttcaattttttctaaataacttggaaaatctaatggattcgcagaggtcattcccttatcgaattctgtaaatgatccttcatcagaaattgcttctatacgtttatacgcagttaaagcaatatgatgatcacaattaaagcacacatttaaattttcagctaattcttttgtgtacataattttcttacactttggacacttagtcataatacctgcaggcacatcattatttttagagtcttgtactgtaagatatttctttttctttgttcgattaaaaaaatctttaaacataggaaaacctccaaataacctctgttctaaccatttagagccttaaactgaacttgaccagttaaaaacgggtttaaatttatttgatttatattcgtttgactgttgaatgtttatcataaactttcattttcatcattttaatgactctttattgctaacttttaagcaatttaattaaacgttaattatttttattgtaaatctgtaagtttcattgttttatcatacacatcttgcggatcaacttcaatcctagctactccagattccattgccgctttagcaacattacgagcaactgatggcgctacacgtttatcaaacggtcctgggatacagtagtcttcatttaattcagaactatcgattaaatcagcaatcgcttctacagctgcctttttcatttcttcatttatatgtgtagcttcaacctctaatgcacctctaaaaataccagggaaagctaatacattattaatttggttaggatagtctgaacgtcctgtaccaacaactcgtgcacctgccgctttggcatcatcaggtattatttcaggatttggattagccattgcaaatataattggattatctgccatactcttaaccatatcttgtgacagcgcattagctacagaaaccccgataaatacatctgcatcttttacgacttcttctaaagacccttcaatcttatctttatttgtccattttgctacaacatctttcgtaggattcataccatatgaacgtccttcaaaaattgcgcctcttgagtcacacataaccatatttcttacaccatacgcgtatagtaatttaacaatggctattcctgctgcaccagcaccatttagtacaacttttattttagcaatatctttgttaacaactctcaatgcatttagcaaacctgccaatgttacaattgctgtaccatgttgatcgtcatggaataccggaatattagtttcttttttcaatcgttcttcaatttcaaaacaacgtggtgccgaaatatcctctaaattaataccaccataattaggttctaacaacttaactgttttaatgatttcttcggtatcagttgtatttaacgcaataggcaccccattgataccagcgaagcttttgaataatactgctttaccttccattacaggaatacttgcttcaggtccaatgttacctaaacctaataccgctgttccatcagtaataactgcaactgtatttcctttaattgtgtaatcatatacttttcttttatcttcataaatatctttacacggttcagcaacgccaggtgagtatgctaaacttaattcctctttattagtaacttttacatttggtttaacttctaatttaccttgattacgtttgtgcatttccaatgcttcatctcttaatgacatgaaatcagcccctaattcaatatttatttttaaaaaataacttggataaaacgcattacattataaaagtaaaaatattgggtaaatctgaatgagtaagaatttatggttttgattatgtaacacaaatagcgataaacgataataaaataatatttataaagatacattaaaccatactatctaaagatatacctttaattattataatggatagcaaaaaccaatatatcaaaaagttattatttttccgcacgatatatcgacaaaattctttactcaatttatgtatactgctttttgtgctaattattcttatggattaatcaataatgtaaagtgaaactcataaaaataataagcataaaaaactaatataaacgcaaactgatggttaaaaaatatctaaccatcagtttactatatcataatttattagttgataaaagttatataagcctaatatcactagggttaaaggattgtataaaattattaaacatactatctttttgattaatatagcctaaagtagtcatttgtttaatcgtttcatcataaaaggataacacaacatcattagcattctctttcgtagctttaatcatctcttcaaacatatctatttgtgatttatttctaattataatttgtttggcaaatgctaatttttgttcttcaaaagtggctaatgtctgaatctcatttataattagttgacgttgttgctttctatggtcaaatttcccgctaactataaacaagtcattatgtgataacaactcttcgtactttttaaactgattagggaaaatcacaccatctaaagtttcaatgccatcatttaatgtgacgaatgccatattttgaccatttttagttcgaatttgtttaactttatcaaactgtactaatataggtttataattctgcgcgttactcaatttaaatatcgttaaatattgtttggcaacaaactttttatctactgggtgttgcgaaacataaaatcctaaatattctttttcgtactgactaataagtgcatcaggcaattcttctttatcttcatacatctgttttggcgttaaaatatcaaataaaaaaccatcttgttcaatgtttaaatcgccatccaacacttgatcaatagcttgcaacaacgttgaacgtgttttaccaaaagcatcaaacgctcccactaaaatcagtgcttcaagtaactttctcgttttgactctcttcggtatacgtctagcaaaatcaaagaaatctttaaatttgccgttctgataacgttcatcaacaatcactttcacactttgataaccaacacctttaattgtaccaattgataaataaatgccttcttgggaaggtttataaaaccaatgactttcgttaatgttcggtggcaatatagtgataccttgtttttttgcttcttctatcatttgagcagttttcttctcacttccaataacattacttaaaatatttgcgtaaaaataatttggataatggacttttaaaaagctcataatgtatgcaattttagaatagctgacagcatgtgctctaggaaaaccataatcagcaaatttcagaatcaaatcaaatatttgcttactaatgtcttcgtgataaccattttgctttgcaccttctataaaatgttgacgctcactttcaagaacagctctattttttttactcattgctcttcttaaaatatccgcttcaccataactgaagtttgcaaatgtgctcgctatttgcataatttgctcttgataaataataacaccgtaagtattttttaatataggttctaaatgcggatgtaaatattgaactttgcttggatcatgtcttcttgtaatgtaagttggaatttcttccattggacctggtctatacaaagaagttacagcaacaatatcttcaaagtgttccggctttaatttttttaatacacttcttacaccgtcagactctaattggaatatgccagtcgtatctccttgcaacaacaattcaaacactttttgatcatcaaacggaatcttttcgatatcaatattaatacctaaatcttttttgacttgtgttaagatttgatgaataatcgataagtttctcaaccctagaaaatctatttttaataacccaatacgttcggcttcagtcattgtccattgcgttaataatcctgtatcccctttcgttaaaggggcatattcatataatggatggtcattaataataattcctgccgcatgtgtagatgtatgtcttggtaaaccttctaactttttacaaatactgaaccagcgttcatgtcgatggtttcgatgtacaaactttttaaaatcgtcaatttgatatgcttcatcaagtgtaattcctaatttatgtgggattaaacttgaaatttcatttaatgtaacttcatcaaaccccataattcttccaacatctctagcaactgctcttgcaagcagatgaccgaaagtcacaattccagatacatgtagctcgccatatttttcttggacgtactgaatgaccctttctcggcgtgtatcttcaaagtcaatatcaatatcaggcattgttacacgttctgggtttaaaaaacgttcaaataatagattgaatttaataggatcaatcgttgtaattcccaataaataactgaccagtgagccagctgaagaaccacgaccaggacctaccatcacatcattcgttttcgcataatggattaaatcacttactattaagaaataatcttcaaaacccatattagtaataactttatactcatatttcaatcgctctaaatagacgtcataattaagttctaattttttcaattgtgtaactaagacacgccacaaatattttttagctgattcatcattaggtgtctcatattgaggaagtagagattgatgatattttaattctgcatcacacttttgagctataacatcaacctgcgttaaatattcttggttaatatctaattgattaatttccttttcagttaaaaaatgtgcaccaaaatcttcttgatcatgaattaagtctaattttgtattgtctctaatagctgctaatgcagaaatcgtatcggcatcttgacgtgtttggtaacaaacattttgaatccaaacatgttttctaccttgaatcgaaatactaaggtggtccatatatgtgtcattatgggtttcaaacacttgtacaatatcacgatgttgatcaccgacttttttaaaaatgataatcatattgttagaaaatcgttttaataattcaaacgacacatgttctaatgcattcatttttatttccgatgatagttgatacaaatcttttaatccatcattatttttagctagaacaactgtttcgactgtatttaatccatttgtcacatatattgtcataccaaaaatcggtttaatgttatttgctatacatgcatcataaaatttaggaaaaccatacaatacattggtgtcagttatggcaagtgcatcaacattttcagacacagcaagtcttacggcatcttctatttttaagcttgaatttaacaaatcataagccgtatgaatatttaaatatgccaccatgattgaatggcccctttctattagttaagttttgtgcgtaaagctgtagcaagttgctcaaattcatcccagctgtccactgaaactcctgacgcattcggatgaccaccgccaccaaaatcttgcgcaatatcattaataatcaattgccctttagaacgtaatcgacatctgatttcattaccttcatcgactgcaaatacccatattttcaagcctttgatgtcagcaattgtattaacaaactgagatgcttcatttggctgaataccgaattgctccaatacatcttcagttattttaacttggcagaatccatcatccataagttcgaaatgttgtaaaacataaccttgaaacggcaacatttttgggtccttctccatcattttatttaaaagcgcattatgatcaatatcatgcccaattaactttccagcaatttccatagtatgttctgaggtattgttaaaaaggaatcgcccagtatcaccgacgataccaagatataaaacgctcgcgatatctttattaacaattgcttcatcattaaaatgtgagattaaatcgtaaatgatttcacttgtagatgacgcgttcgtattaactaaattaatatcaccatactgatcaactgcaggatgatgatctattttaataagtttacgacctgtactataacgttcatcgtcaattcgtggagcattggcagtatcacatacaattacaagcgcatcttgatatgttttatcatcaatgttatctaactctccaataaaacttaatgatgattccgcttcacccactgcaaatacttgcttttgcggaaatttctgctgaatatagtattttaaaccaagttgtgaaccatatgcatcaggatctggtctaacatgtctgtgtataataattgtatcgttgtcttcgatacatttcataatttcattcaaagtactaatcattttcatactcccttttttagaaaagttgcttaatttaagcattagtctatatcaaaatatctaaattataaaaattgttactaccatattaaactatttgcccgttttaattatttagatatatatattttcatactatttagttcaggggccccaacacagagaaattggacccctaatttctacaaacaatgcaagttggggtggggccccaacgtttgtgcgaaatctatcttatgcctattttctctgctaagttcctatacttcgtcaaacatttggcatatcacgagagcgctcgctactttgtcgttttgactatgcatgttcacttctattttggcgaagtttcttccgacgtctagtatgccaaagcgcactgttatatgtgattcaataggtactgttttaatatacacgatatttaagttctctatcatgacattaccttttttaaatttacgcatttcatattgtattgtttcttctataatacttacaaatgccgctttacttactgttccgtaatgattgattaaaagtggtgaaacttctactgtaattccatcttgattcattgttatatatttggcgatttgatcgttaattgtttcacccatctgaggctgtcttcctaaaagttgcatagactttaaaacatcttgtctattaatcacacccactgtctttttattactcgaaacgacaggaatcaattcaataccttcccaaatcatcatatgcgcacaacttgctactgtactcatagcatttacataaataggatttcgcgtcatcactttatctatttcgtcgtcgtcctttgtattaatcatctctcgacttgttacaatacctactaatttatacgactcattgactaccggaaatcttgtatggccagttcgattcgccatacgcttataatctgctattttcatcgtatcaaacagcacagataaatcatctaatggcgtcattatatcttgaactattaagatatcttttcgtattttctgattaaaaagtgctttgttgataatatttgcaactaggaatgtatcataacttgatgatagaacaggtaaatcatgttcattcgcaaaattaataactttattagatggcttaaatccaccagtaattaatatagccgtacctctttttaaagcttcaatctgcacatcttcacgatttccgacaatcaataatgtctttggaccaatatactttaaaatatctttgagttccattgctccaattgcaaatttagataccatcttagtgatacctttgttgccacctaacacttggccatcaataatattgacaatttcattaaaagttaaatgttcaatttcattacgattacgtttttcgattcgaaccgtaccaacacgatctatcgttgcgaccatgcccattttatcagcatctttaattgcacgatatgctgtcccttcagatacgtttaaaaatttagcgattttacgcaccgaaattttagagcctatagataacgattcaatataatctaaaatttgttcatgttttgtcattctttacctcttcttttcgaacagtattaactacattataactttattttggataaaaagcattgaagtgaaatgaaataatgatcgtttcacctattttattttttgaaaatatacaacaaacacaaagatcacaaaatctttaattttaaatggaaaaatccattattatttattagaatgtaagtgaggagggatgtactaatgtataaaaatatattacttggtgtagacactcagttaaaaaatgaaaaagcactaaaagaagtgtctaaattagctggcgaaggtacagtcgtaacagttttaaacgcaatcagcgaacaagatgctcaagcatcaattaaagcaggtgttcatttaaacaaacttactgaagaacgaagcaagcgattggaaaaaacacgcaaagctttagaagattatggtattgattatgaccaaataattgttcgtggtaatgcaaaagaagaactattaaaacatgctaatagcggtaaatacgaaattgttgttttaagtaaccgtaaagcagaagacaaaaagaaatttgtacttggaagtgtcagccacaaagtagcaaaacgtgcgactatccctgtattaatcgttaaataaaatttttatccagaatcacaaataatctttcaatcatgatgcagtctcaaacgactgagtaaatacaagaaacgattatgactgtggttctggattttttatatcgtagtaaatttataatcaatgtctaattgtataaaactaaaattacgagagtaggtcagaaatgataaagaaccactgatgtcccccgtccacgtcgtaactgaatcagtagaatataaaaacacccactaaaaatatgcagacgataacttccacatagattagcgaggtgttttttagtgtaaaatctatattctatttaaaactgaacagattcacctggttttaaaatttgcacgtcccctacattaacagcatctttaaattgttgtggatcttgttcgattaatgggaatgtatcataatgaatcggtacagaaatttttggtttaataaattcattaatagcataacttgcatcatcaatacccatcgtaaaattatctccaattggtacaaaacatacatcaactggatgacgtttcgcaataagtgacatgtcactaaacagacctgtatcaccagtatgataaattgtttttccttcaacttcaaacacgatacccattggcatacctaaataaactggaataccattttcatgtgtaaaacttgaactatgaaatgcttgaacaaatttaacgcttccgaaatcaaagtttgctttaccaccaatattcataccatgaacattttcaacaccgtgatatgaagaaagatagtcagccatttctgcacttccaattactgttgctcctgttttctttgctagttccacaacatcaccaaaatgatcaaaatgaccgtgcgttaaaacgatatagtctacctgcactgtttcaatattcaaatcacacttagggttatttgaaataaacggatctacgataacctttttgttgttcccttctaaataaatcgttgattgaccatgaaatgataacttcatttgagcatcctcctatcaattactatataaatttagtacccttttgccacttaattataacaaattctcaaattttaaaaattgaaaatctagttaatgtattagctcgattttgaaatctaataataattggcataaaatggaagtaatattatgttgaggagtgtttataaaatgacaaaaatatcaaaaataatagacgaattgaacaatcaacaagctgatgcagcatggattacaacaccgttgaatgtatattattttactggataccgtagcgaaccccatgaaagattatttgcattattgattaagaaagatggtaaacaagtactattttgtccaaaaatggaagtcgaagaagtcaaagcatcacctttcacaggtgaaatcgttggatatttagacactgaaaaccctttttcactttatcctcaaacaatcaataaattactaattgaaagcgagcacttaacagtagcacgccaaaaacaattaatctctggtttcaatgtcaattcattcggagatgttgatttaacaatcaaacaattgagaaatattaaatccgaagatgaaattagcaaaatacgtaaagctgctgagttagcagataagtgtatcgaaataggtgtttcttatttaaaagaaggtgtgactgaatgtgaagtagtcaaccatattgagcaaactatcaaacaatatggcgtcaatgaaatgagttttgatacgatggttttatttggagatcatgccgcatcacctcatggcacaccaggagatcgcagattaaaaagcaatgaatatgtactatttgatttaggtgtaatttatgagcattattgtagcgatatgacacgtactattaaatttggtgaacctagcaaagaagcacaagaaatttataatattgtattagaagcagaaacatctgcaatccaagcaattaaacctggaataccattaaaagatatcgatcatatcgctagaaatattatttcagaaaaaggttatggtgaatatttccctcatcgcttaggtcatggcctaggattacaagaacatgaatatcaagatgtttcaagtactaattctaatttgttagaagctggcatggttattacaatcgaaccaggtatttatgtacctggtgttgcaggtgtaagaattgaagatgacatacttgtcactaatgaaggatatgaagtattaacacattacgaaaaataaggagtgggataaaaatgaaaagcttgttacaagcgcattctcattcagtcaaacactgccaatataacattgtagcgcctaagacataaatttttatccaagtctaaatgcaatatgtaacaaacaagctagaaacacatatgcaggtatgttcatcagtaacatgtaatgaatcaaatcaatatcattcatgttcgatgatttcttcgcattgtttctagctttaatttatcattatttaattttaataaccaaggagatgataacgtcattctttagtacgctgtaatccattcccttttcatcaaattcaaattataattgtaatgcttcttctacagatttatattccatttcaaatgcctctgcaacgcctttattggttacgtgacctttgtaagtatttaaacctaatgataatggttgatttgatttaaatgcttctctataccctttattagctagcatgagcgcataaggtagcgtagcattatttaaagctaacgtcgaagtacgcggtactgcacctggcatatttgcaactgcataatgaaccacaccatgcttaatatatgtaggatcatcatgtgtcgtaattttatcagttgtttcaaaaataccgccttgatcaatagcaatgtcaataataactgacccatttttcatttgtttaatcatgtcttctgttacaagtcttggcgctttagcacctggaattaaaactgcacctattactaaatcactttgtttaacatacaactcaatattcaacggatttgacataattgtatgtacacgtccaccgaataaatcatctaattgttgtaaacgctttggattaacatctaaaatcgtaacatctgcacctagtcctagtgcaattttagctgcatttgttcctgcttgaccaccaccgataatagttactttacccttaggtactcctgggacaccacctagtagaattcccataccaccattaagtttttgtaggaactctgcgccaacttgagctgacattcttcctgctacctcactcattggtgataacaatggtaaagatcggtctggtaactgcacagtctcatatgcaatactaattacttttctatctatcaaagcttgtgttaatttttcttcatttgctaaatgaagataagtgaataatacaagcccttctttaaaatatggatattcagattcaagtggttctttaactttaataaccatatccacatcccaaacttttgcttgttcagcaacaatctcagcacctgcttctttgtaatctacatcttcaaagaatgatcctgaacccgcatttgtttccactaaaacagtatgcccactttctactaaagcgtgcacaccacttggtgataaaccaacacgattttcattatttttaatctcccttggtataccaattttcataccatccacctccataatcatcttaacgcgaacattttgaaagcgcaatcaaaaatccacaaaattgtaaaggttattacactgacttttccgaaaattgtggtaaaatataattaagaaagaacaaggaggcacttactatgattacttacaaaaatattttaatcgcagttgacggttcacatgaagcggaatgggcatttaacagagcagttggtgttgctaaacgtaacgatgcgaagttaacaattgtgaatgtaattgattcaagaacgtattcttcttatgaagtttatgatgctcaatttactgaaaaatctaagcattttgcagaagaattattaaatggttataaagaagtagctactaacgctggtgttaaagatgtagaaacgcgtctagagtttggctctcctaaatctatcattcctaaaaagcttgcacatgaaattaatgcagacttgattatgagtggtacatcaggcttaaatgccgtggaaagatttattgttggttctgtatcagaatctatcgttcgtcatgcgccatgtgacgtgttagttgttcgtactgaagagttaccagcagacttccaaccacaagttgcaacaactcaattacgtgaaaaatatcaaaattaaatatagatgatcattagataactacttgatcattatgaaccaagtgcaactttctgcacttggttttttattgtttataaataaaactcacttaataatgttttcataatcttcttcgactacttaattctttaagatattcgtgaaaagagacattacactagttaattttcaaacaatacaaaaagcgtctacctcctacatataattgtagcggagatagacgcttaatatttatttaaaaattattttaaaccaccgaatgtcataacatcacgggcaatcatactttcttcatctgttggaataacgacaactttaactggtgaatgaggatagttaataaatccttctttaccacgtagtaagttttcatttttcttaggatcccagtaaacacccataaattctaagccttcaagaactttcgcacgaatttctactgagttttcaccgatacctgctgtaaatacgataacatcaacaccatgcattctcgcagcatatgatccaatatatttgtgaattttagaagcaaatacatctaaagccatttgtgaacgtgctttacctgattcagcttcttctgataagtcacgtaaatcactagatgtacctgataatcctaataaacctgattctttgtttaagatttccaatacttgttcagcagttttacctgttttttccataataaatggaattaaagcagggtcaatattaccagaacgagtacccattgttacaccagcaagtggtgtgaagcccattgatgtatcaatagatttaccgccatcgatagctgcaattgatgctccattaccaatgtgacatgaaataatacgtaaatcttcaattggcttatctaacatttctgccgctctttgtgatacaaatttatggcttgtaccatggaaaccatacttacgaatgccataatctttataataatgatatggcaagctatatagatatgctttttcaggcattgtttgatggaatgctgtatcaaaaattgccacatgagggatatttggtaataatttacggaaagcacgaatacccatcaagttagctgggttgtgaagcggtgctaattcgcttaattcttcaatttccttttcaacctcatcagtaatagctactgattcagggaatttttcaccaccatgtacaacacggtgacctgttccatcgatatcgttaatatcattaataatattgtgcgctttaaaagcatccaacatgatatcaactgcctcaacgtgatccttgatatcttgtactgttttaactttttctccgttgacttcaattgtaaaaattgaatccttcaatccgattctttctactaaaccttttgttactaattcctcttcaggcattctaattaattgaaattttaatgatgaactaccagcattgatagccaagattaattttgacataagtaatgatcctccatcgtttgctttttatactatttcatttttcattttatcattcatacagttttatgactatactattacagattattttttaggacgatttgtgtccatccactgatttaactctgtcataaatccttgaaattgtgaaggaattttgaaatcaggaatatttgccaataatacttcaactggctttgtttcacccgattttttcttttgtaaaattaatatagattttcgcgctttttcatttttaaataaagttggtggtaaatttaaaaatgcttgcatctctgtctctgttgcaatatatttttcaagctgttttacatgttcacctgtaaaaatattacttggtaccactagaaaggcatatccagcatcttttaatgcatttattgcttgttctattaataaataatgtgaataactatgtccttcttcaaaacctagcttaaactccttacttctttcatcaattggataatagcctactggaaaatcaccaataacgatatctgcttcttctaatggtagtggcatgatggcatcttgaggatacacatcgaaaggaatttctaagaagtttgctaaatgtacactaacacgtgataaaactggatcaacttcaattaaatgatgcataaccgcaatttcaggtaacacttcttttacagtagcacttaaatgaccggcaccacttgcaatatcaacaatatgtaattcttcttggttgttcataaaacgctcaactaaaaatcctagtatcaatccaattgaatctggtgtaatttgatgatttgcttgtatcttttcttcctgcattaaacttaaatatgcaaattggaatgctttacgtcgatcttgtaacgtcgattgttctaacaatcctctttcattggtatatacttgttccattgctagcccaagattttcaataaaactttggccattttcattatttaatgttttagctttttcatctaatgtatgaaacaagcgttccataattgtttgttgttctgccatattcgtccctctccaataaaaagtgcccataggtcttagcaatcatagaaaacaattctattttaatgctgttgacaacgatggacacgatgtatacattttaagatttatctctttaatgattaaatatttttgtatgcagctaaagcagcatcaaaatctgggaaatcagtaccttcactaacgatttctttataaacaactttattatctgcatctaatacaaatactgcacgagctaataagcgaagttcttccataacaacgccatagttttcaccaaatgataagtcacggtggtcacttaatgtaatgacattgtctaaacctgctgaagcgcaccatcttttttgtgcgaatggtaagtctgctgaaattgtaagcacaatcccctcttctttagaagcatcagagttgaatttgcgagtctgctgatcacaaacacctgtatcaattgatggtaccacactaattaatttctttttaccagcataatctgctaatgttacttgatttaagtcattatctaacactgtaaaatcaggtgcaaaatcaccttcattaatttgttgaccttttaagtggattggtccacctttgaatgttatttcagtcatatacttgacctcctgcattttaaaattctaactacatcatacgacaatttatggtttgattacaattttcatgctttaatcaaaagcaaatttaattttatacaaattgttgaatataatcaaaagcattttttaaaattaaaatagcagtaataataataaataatacttttacataaccaacaccttgtttaatagcaaaatgagccccagcatatgacccagcaatcatacttatagccataattaaacctattacataatctacttgtcctaataccataaataatacaagcgcacctatattagaagcaaagttcaaaactttagcatttcctgctgcacttaaaaaatcaaaaccaaagactaacaatacaaaaagcataaatgaacctgttcccccacctacaaatccatcataaaagccgattaatataaaaagtgctgcaaatattatggctttcttaaatgtaaattgagtaaacgtgcgtgtattgccccaatcttttttaagtaatgtgaatataaacaccgacgaaagtgcaatgatgattaaaggtttcaatatttgtgacggaaccatcgttgcaatatatgcgccacatgcagatgccaaaaatacaaaaccaaataatttggcaacaacatataagtccactttaccggaccttataaactttatcgtactagttaaagaaccaaacgaacttgccaatttatttgtacctaaagccacagatggtggtagaccgattgctaataatgctggcgtagaaattaaaccgccaccccctacaaccgaatctataaacgccgcgataaaaccaaataaaattatgattataatcatcgttaagttcaaatccatagtttaacatccccttatgtttaaatttactctaggattttatttataaaaagtcgtttattaattggtttgtttgctgttctttaatagttttataatcactagttatttcaagtgtttcaatattttcaacagcacgattaatcatctcttcaaaatcaaagacactttcatattggactaccttatcaaagtttggttcggttactggatttttaggggtgaaaattgtacaacaatcttcaaatggttgaatagatgtttcaaatgtaccaatttctttcgatttaataataatttcttctttatcgtaagttaataaaggacgtaatacaggagtagaagttacattattaattgcatacatgctatgaagtgtttgactggctacctgccctaggttttcaccatttacaatagctaaagcccctatttgatgtactaatttatcagcaacacgcatcatcatacgtctcgttgaagtcattgtatatcttggatgtacaactttatttacctgtttttgcaattctgtaaatggtacaatatgcaatttaattggtccaacacgttcagctaaaatacgtgtcaattcaataactttttcttttgcttgatcacttgtaaatggtggactatggaaatgaatcgcttcaattgttacgccacgtctcatcacttccatcccagcaactggtgagtctataccgcctgaaagcattagtaacgtcttaccaccagtaccaactggtaatccacctgaacccggaacaacttcttcatacatataaattgcatctaatctaacttccactcgaatttcatgatctggacgtttgacattcactgaaatattgtcgaagtgcttcaatactgcaccacccaattcacgctgtaattcatacgtatccattgggaaatttttatcggcacgcttcacatcaattttaaatgtgctgttttcttcaaattgctgcgcaaatttaattgccgctgcacttattgcctctattgttttttctacttttaatactggactaatagatttaataccgaaaatttttgataatcgatatgttatttcatttatatctgcatggtcttcaagttcaatatacatacgatctcgtttgcctttaacgacaaacccatcaagtccttttaatgacttatttacattatttcttaattgatttacaaatttctttctatttgaaccctttaatgttaactccccgtatctaacaagcaagtgatcatacttcattattttagcaactccttaatttcctcataaatgatgataaatatttctttaaacctcgctatatcttctttagttgtagtagccccaaatgataatcttatactaccttcaatagatttgtctgataatcccattgcagccaatacttcatttaatttattacgtttagatgaacaagcacttgtcgtagatatcataatgtcatattttgaaaaagcattaactaatacttcaccttttacgccaggaaaactaatatttaaaacgaatggtgaacctgaagttgaagaattaatataaactccatgatatttatttaaaaattgacggacgtcattatttaactcagtaacaaatgcattcaatgcttcaaagttttcattagctatcttcatcgctttaaccattgcaatatcatttggcaaattaactgttccacttctaacgccatattcttgaccaccaccatggacagttggttcaacattttgaatgtgatttacaagtaagacgccttgtccttttaaaccattaaacttgtgtccacttaaactaatactatctatgttattgagatccattgaaattttgccgaatgcttgaaccgcatctacatgaaaatgtgccttaggataattttttataactttagccatttgtggaataggctgtatttgtccagttacattatttacatacatacatgttactaaaccgactttgtctgacattaattctttgaagtgttctaagttaatactgccatctttctttacatcaacatatttaactttaaatccttcgtgtgcttccaaatatcttacaacctctaatacggacggatgctctaacacggatgtaattatttccttcgctgtatcaaatttacgataggcaataccttttaaagcaagattattggattcagttgcaccactagtgaatacaacatcataatttgtttttgaattaatcattgcattaatttgggtttttgcttgttgtagtaattgatttgcctgcaaaccagctttatgcggactattcggattataatacattgattgatttacttttaaataagtatctaacacttcttcaaatgctttcgtcgttgccgcattatctagatatatcaaaataaacacttctctttcattaatcatcaatcgttaaaattgttttactcaagcattatactattatccgacaaaaaataaaggttatagcgcaaaataatcttatttctacttattaaataagaattagactatttcactctatttaaacagctgtgtgattatgcttttttcactacttatattaattaaaacaacacatttgattacgtttatctttaaacaattgctatttatatttattgtccctttcatttatccatataaaaaagaagctagacaacgtatcgttggctaacttcaattattaaactcatcagtccaatttgacagagtgctcatattatttaagtataactacatactagtttctattgcttaataacttcttcttcaatatgtttagtaacacctggctcaacactttcaagagcttgctctgcaatttcaatcgcacgcttatagcgattatttttaaataatcgttcagcttcatttaagctcttatcaacattgctatagtccttacgatatctatttccatattgaattaatttctctgcataaacagcattaacaagaacatcatttgcttcatcttcaaatgtattcatttgaatcacaattttagacactttatcttttaactgtttaacgtgtattggacgttcactaaattgttcgttaacatcacgaacttcatgatcaatttcatttttcatgatgataaacctttcaggaacgcttgttaagttagaagcaagtaatcgacgatacacttcttctttcttcgattgtactcgtagcagattgtcttctgcttctgcttcatcttcacgcaattgaatcagatgattttgtagcttttcttgtttgtcattaataactgtgacatgatcttctaaatattgtaaattatcctgaacctcgctatatcgcacagcagatttagacatttcttttaaaatatcatcatatacagaaattaaactttgaatttcattttcaaattgacgaacactctgagcatcagattcatttatatagtagttttcacgtacatattcaatttctgtttgcaatgtataattcatgtctttagctttgaataagttatccgtaatgatatcttttgtttcttcgacatcatttttagctttaacttcatgttcaattaaatcatacatgtcatctaacttatcattgatattagctagtttatcattagcttcttctaattctaagcggctaattaatggttcaacgaaactaagctctgtttttaagctttgtaatgtactgtctactttcacgtgatccagatcatacccttcaactttaagatcacggcaaccatattttaaatcttggaattgaccaggtaattctttttgagtttctctaattaattctggtatttcttccatataagatcttagctgtttcatttgttcattcaaggcagctatatggttgtgcgcttgtacataattaccatcagcttttagtacttcatattgctctaaccttggctcaaatttttcaatttcagtttcaagtagacttgctgcctcaccaaattgatgacgatttgctaaaacatcacgtttcatttcacgataatcaaccttacatttgtcatataattcatcattatctttgtataacgcaataatttcatttacatcttctaattgttgctgatagctttgttcgtaactatccatcaactcatttgcatcatcaatttcactttgagatgcgttgaaactaaatttatctaataaagcctcagcattatggattttttcttccacaggagctagatacttatttgtactttctacgttgtcctttttcattgcatcgtatttcgtttttgtttcaccttttaaattcaacttagataattgtgcaaggttttgatcaaaaggtaacgtctcaatttcatttttacgttcgattgctttttcaataatttgtcgtttatttgaacgtaaatagaataatacacctacagcaatcaatataatcacaattattgccaaaatgatatataacaccatatgcttctcctcctaatttatcattactattataacgtaattttgcttaaggataaattataaaatgaatttattgccataatattttcgaaattctatactattataaaatctatgaaaataagaggttttaaatatgacaacaattaacccaacaaactacacattattaaagaaacaagcagcaagccttattgaagatgaacatcacatgattgctattttaagtaacatgtctgccttattaaatgataatctagatcaaattaattgggttggcttttacttattggaacaaaatgaacttatacttggacctttccaaggacaccccgcttgtgtccacattccaattggaaaaggtgtatgtggtacagccgtttcagaacgtcgtacacaaattgtagctgatgttcatcaattcgaaggacatatcgcttgtgatgctaatagtaagtctgagattgtcgttccaattttcaaagatgataaaattatcggcgtcttagatatcgatgcccctataacggatcgatttgatgacaatgacaaagaacatcttgaagcaattgttaaaattattgaaaagcaactcgcataaaaggacatcagcattttcaataaagtgttgacagttagcaggaaaatgttacaataatctttgtgtgaattaacgaaagtagcagttgtatattattgagcgctatgttgttcccaatgcggacgtgtcacgtaactgtcgctataaggtgaagacacataaaacaatatatcttagtaagcatgcaacactcttttttgtttattcataacaacaaaaaagaattaaaggaggagtcttattatggctcgattcagaggttcaaactggaaaaaatctcgtcgtttaggtatctctttaagcggtactggtaaagaattagaaaaacgtccttacgcaccaggacaacatggtccaaaccaacgtaaaaaattatcagaatatggtttacaattacgtgaaaaacaaaaattacgttacttatatggaatgactgaaagacaattccgtaacacatttgacatcgctggtaaaaaattcggtgtacacggtgaaaacttcatgatcttattagcaagtcgtttagacgctgttgtttattcattaggtttagctcgtactcgtcgtcaagcacgtcaattagttaaccacggtcatatcttagtagatggtaaacgtgttgatattccatcttattctgttaaacctggtcaaacaatttcagttcgtgaaaaatctcaaaaattaaacatcatcgttgaatcagttgaaatcaacaatttcgtacctgagtacttaaactttgatgctgacagcttaactggtactttcgtacgtttaccagaacgtagcgaattacctgctgaaattaacgaacaattaatcgttgagtactactcaagataatacgttcaatacaaacacccacaattgtgggtgttttttttattaatttaaaaatgatagattcaaaattatatggagctaccctattttacaatcaacttagaatttacaagtcttatttgtttaattatctttagtatttcatcattagtttttaaaattatcaattgcgatatacgaatcctcatccctctatcaaattaccattcatcgtctcacttaataaataatttcggattatctgtaattaatccatctacacccatttgtcttaatttttctccagttttcaatttattaactgtgtatggcataacctgtaattgatgatgatgtgctttatcaacaaattttctggtcactaatgcataattaggattaacataactagcaatttgagcaattcttgaaaagtttggctttttataccaataattacgtttactacaaagcacacctaattcatatatactgcccaatgtgtttaacttttcgatgcattcgatatcaaaagattgtataactacttgtgtcgcatcgactttcttttcttccaaaaatgccagcaatttacattctatttctggatataaattcggacttttcaattcaatcaatagctttttatcatactttaagcataatgaaagtacttcatctaacgtgggtattcgttctcccttaaaagcaacatctttataactaccaaaatcaaatgattttaattgcgataatgtgtaatcagcaatacgccccttaccatccgatgttctatcaattgtttcatcatgtatcacaacaaaatgttggtctttggtcaaatgaacatctatttctaacatagcaacattgagccccattacctctcgataaccgaccattgtattttcaggaaaatcactcggcaatccacggtgcgaaacaatttgtaattcatctttcagtttattcagagtcattgataagtcacctttctgttaaactttgataaactattctaaaattaaactatcacaattatattggaggttaaagcaattgcatcaacatgactttaaagtccaaacttcttggcaaggtggtcgtaacaatgtcggaaacgttcaaggcgacatactttcagagaatatttctatacctgcttctttaggtggtgttggtataggaacaaatcccgatgaaatgttagtatcagccgcttcatcatgttatatcatctcattagcagctactcttgaacgtgcaaagttcacagatatttcaattgaacaacaatcgattggaacagcttgtttaaataacggaaaattcagtatgtcaaaaattgtgcaccatcctcaaattcaaattccaagtgatcaaatagcacaattagaaaagcgattaccaaaattgataacaattgcagataataattgcatgatttcaaatgctgtaagaaataatgtggacataaaaatctatcccatcattcaggccaaataaaatcgttaagtgataacgtttgttcgacaatatagcgttatcacttttttaggcttttaaattttcagaaaatttgctaaaatagtgaaatcttatttataggaggcatataaatgtattatcatcaaccgttgttattaacacctggcccaacccctgtacctgatgccattatgagagaaattcaagcacctatggttggtcatcgttctaaagattttgaagacatcgcacaacaagcatttcaaggtctaaagccaatatttgggagtcaaaatgatgtacttattttaacatctagcggtacaagcgtcttggaggctagtatgttgaacattgtaaaccctgaagatcacttcgttgtcattgtttcaggtgcctttggtaaccgatttaaacaaattgcacaaacttattacaaaaatgtgcatatttatgacgtaacatggggagaagctgtagatgtcaaagatttcatcaatttcctttcaactttaaatgttgaagttaaagcagtatttagtcaatattgcgaaacatctacgacagtgctacaccctattcacgagttaggaaatgccattaatcaatttaatagtaatatttattttgtagttgacggcgtaagttgcattggtgctgttgatgttgacattaacaaagataaaattgatgtacttgtttctggtagtcaaaaagcaattatgttacctccaggattagcttttgtagcttatagccaccgtgcaaaagaacatttcaaagaagtaactacgccaaaattttatctagacttaaataaatacatttcgtcacaagctgacaattctacaccgttcacaccaaatgtgtctttatttagaggtgtaaatgcatacgttgaaaccgtaaaagcagaaggtttcaatcacgtaatagcacgacactatgcaattagaaatgcattaagaagcgccttaaaagcattagatttaactttattagtcaatgataaagatgcatctccaacggttacagcattcaaacctaatacaaatgatgaagtgaaaataatcaaagatgaacttaaaaatcgctttaaaataacaattgctggtggtcaaggccatcttaaaggtcaaattttaagaattggtcatatggggaaaattagtcctttcgatattttatcggtagtatctgctttagaaattattttaactgaacaccgtaaagttaactatatcggtaaaggtatatcaaaatatatggaggttattcatgaagcaatttaatgtactcgttgcagatcccatatcaaaagatggtatcaaagcattattagatcacgaacaattcaatgtagatattcaaactggcttgtccgaagaagcattaatcaaaattataccttcataccatgctttaatcgttcgtagtcaaactacggttactgaaaatatcataaatgctgctgattctttaaaagtaatcgcacgcgccggtgttggtgtagataatattaatattgatgctgcaacattaaaaggtattttagttattaatgccccagatggtaatacgatttcagctactgaacatacactggcaatgttattatcaatggcacgaaatattccgcaagcacaccaatcacttacaaataaagaatggaatcgaaatgcatttaaaggtactgagctttatcataaaacattaggtgtcattggtgctggtagaattggtttaggtgttgctaaacgtgcgcaaagtttcggaatgaaaatactagcttttgacccttacttaacggatgaaaaagcaaaatctttaagcattacgaaggcaacagttgatgagattgcccaacattctgatttcgttacattacatacaccactaacacctaaaacaaaaggcttaattaatgctgtcttttttgccaaagcaaaacctagtttgcaaataatcaatgtggcacgtggtggtattattgatgaaaaggcgctaataaaagcattagacgaaggacaaattagtcgggcagctatcgatgtgtttgaacatgaacctgcaactgactcgcctcttgttgcacatgataaaattattgttacacctcatttgggtgcttcaacagtcgaagctcaagaaaaagtggcaatttctgtttcaaatgaaatcatcgaaattttaattgatggtactgtaacgcatgcagtgaatgcacctaaaatggacttaagcaatatagatgatactgtaaaatcattcatcaatttaagccaaacagttggtgaattagctattcaattaatgtacaatgcaccaagctctattaaaattacgtacggtggcgacttagcctctattgatagtagtttattaacacgtacaattattactcatattttaaaagatgatcttggtcctgaagtcaatattatcaatgctctaatgttgttaaatcaacaacaagtgacattaaatattgaaaataataaagcagagacaggttttagtaactacttagaggtagaactatcaaacgatagcgattccgttaaagttggcgcttctgtctttacaggtttcggtccaagaattgttagaattaataatttttctgtagacttaaagccaaatcaatatcaaattgtgtcatatcataatgatactccaggtatggtaggaaaaactggcgcattgttaggtaaatacaatatcaacattgcatctatgactttaggtagaactgaagcgggcggagatgcgctaatgattttatccgttgatcaacctgtttcaaacaatataattgatgaacttaaacaagttggtgaatacaatcaaattttcacaactgaattgacggtacagtcataaacaatttatgtaaattcaaaatgccaagaagacattggattacttccattgcttcttggcatttttttcattattaatttcattgtaactcaatatgaaacctttggttcaatcattcactacaagttatgctgtcaaacaacaatcaaattacaaattatctagtacacctctaagttcacctaaatgattaataacatagtcggcatgatgcgcttctaactcacctgcagcatccttaccttttaaacctgttaatgttccaataaacgttgcacctattttttgagcacttaataagtcagctaacgaatcgcctactataaatacgtcatctttatttacaatgttatcttgcttattgatataagattcatatttatcgcgattattaccatataaagctgcgatataactaaaaggattcggctttcctaatggtcgtgcttgcggatacatattctctgcttctaaaacatcacttgctgttgcaataaaatcagcttcaaaatatggtaacaatcctaaattttcaaatggcacaacagtctcagtataaggacgacctgttgcaatacctaattcgaaaccagcaccttttaaatcattcagaagtaccttaacttcatctactggtctcaaaataatttcttgataaatataacctgtcttaaaagtagttcgtgctattttcttttcaacatcttcatacaacttcgatcctaaataccattcttgataaacttcttgcgctaacgtccataatgcacccttcaaactaaataaagtagcatccgaaacatgtaactctgttgttgcaaactcttccaaagcagcataaatattatttttaccaacttttacattatccaaaaattgtaaaggtagttgttcatttaaattaaaacagtctgctaagtttgtgcttatattttgcaacttcaattcgacaggctcatcttgatacatgaatgcctcaatttcatcatgtgataactttttcaaaatatcaattaaatgaatactaaaaacgataaataacatatcccaatttgaattcagccctagcgattttaatttgtttaaaatcttatctttttgaaaaattcgattcctaatgtcttgtatatcgttatcagtcaaagtttcccaatctatatgtgaatgaagacctaaataacacttatccattaataattcatataccgttaatgcagagacatcgaaacaacgttcttcacttaaaaaaacgccatcaacatcaaataaaattttcttcacaatccccactccatttctgaaaattcagatataaatcattctactatttgactaaaaaaagcgcaaaccctattgaagttagatttgcgctttagctgtttaaattttataaatgtttttcaatttcatcagcaacctgctgtacgtgtgtaccgacaataacttgagttgaatgtttgccattaacagtaacaccaactgcaccggcgtttttaatcttctgtttatcaataatagatgtgtcttttaactctagacgcaaccttgttgcacaattggttaaattaacaatattctcttgaccgcctaaaccttctaatatttgtatagcatgttgatgatatttactttgtttaatatcattttcaccaggagcaatattatcttttacaactgttgggtcaactaattcattttcacctctaccaatcgtattcaagttaaatacttggattactacacggaaaatcacatagtataagatgaaaaatacaacaccttgaacaagcaacatcaatggatgatttgatactggattaattagtgataacacataatctatcaaacctgcactaaatgaaaatccagctgtccaatggaatgtagctgcgataaataaagataatcctgttaataacgcatgaacaacatataagattggcgcaacaaacataaatgcaaactcaatcggctctgtaacaccaacgaaaaatgctgcaactgaactcgctaggaaccaaccgtaaacttgttttttctgagtagttttagctgtatgatacattgctaacgcagccgctggaataccgaacatcatgattgggaagaatcccgcttgatagcgtcctgtaataccttttatagcatctttgccactttggaatttaccaatatcattaataccaatcgtatcaaaccagaacacactattcagtgcatgatgtaatcctgtaggaattaataatctattggcaacaccatatatgaaagctccaaacgatcctaaaccgactatagattcaccaaattttacaatccatgaataaagtagtggccataagaataacaatatgacaactaaaaatgtacagtaaaatgcagtcataattggaactagacgtttaccactaaaaaatgataatgctaatggtaattctgtttcactaaacttattgtatgcataagctgctattaaacctattacaataccaacaaagacattgccattattcatcttttcaaaagctgaatttatttccgaagctttcattcctaataaaggcgctaatttcattggtgataatacaactgtaactaaaaaatatcctaacgtagctgcaagcgcgactgcaccatcatttttctttgccattcctatagctacaccaattgcaaataaaatacctaattgctctaaaatcgtagtacctaccgtagtaaagaacattgcgattttcggcgtcgcatgaagtgcatttaacgtattaccaattccggcaataattgctgcagccggtaaaatggcaactggtaacattaacgaacgccctaaattttggaaaaatttatacattgaatgtcatccttcttaaaataatgtagaaatataaagattactaatgtaactagaataactacttcgatactccgttatagtcacctaggcttactaaccagctatatttctacctcaagttattttataaactttttacaatttcatgcaattcttgttgtaactttgctgttcgtgtttcaatctcttttgtaatataatcgatacgctcgtttcgttttaaatctttaggtaaatcgttaatatcgattggtttgccaatatttatgtatgcttgtcctgttaaaagaccgtgaatcttagtaggaccaacataagcaacaggtaatattggtgacttacttaacattgcaattgttgaagcaccacgtttcaaaggtgcaccttcttgcgatgtgcgagaacctgttgggaagataccaactgtcttattatctttcaacaaattgattgggcgttttaaagtactaggtcctggattttcacgatctacaggaaatgcatttaaagacgttaaaaatttaccaatccatttatttttgaataattcttttttagccatataatgaatttgattaggatataatgccatacctagcataatgacttcgttataactttcatgcgtacaagttacgacatatttactatccttaggaatattatctttaccgattacgtataatgattttgacattttaactaaaatgaaattcaaaatcttactaatcactgaatacattgtgccacctacttaacttatttgtttataacaactagattttatcactatatttttactagaacaagatagtctgaaaatacatctaaagttgtatagtgtattactagcaataattataaaaaaaagacataattaaagcatatataaatcatataatggaggttaagtatgtcagattttaatcatacagatcattctacaacaaaccatagccaaacacctagatacagaagacctaaatttccatggtttaaaacagtcatcgttgcattgattgctggaattattggtgcacttctagtacttggtataggcaaagtattaaatagtacaattttaaataaagatggttcaactgttcagacaacaaataataaaggtggcaatcaattagacggtcaaagcaagaaattcggtaccgttcatgaaatgataaaatctgtctcccctacaattgttggagttattaacatgcaaaaagcatcaagtgtagacgacttattaaaaggcaaatcatctaaaccatctgaagctggagtaggttcaggtgttatctatcaaataaacaacaattcagcttatatcgttacaaacaatcatgttattgatggcgcaaatgaaattagagtccaattacataataaaaaacaagttaaagcgaaattagttggtaaagatgcagtaactgatattgctgtacttaaaattgaaaatacaaaaggtattaaagcgattcaatttgccaactcttcaaaagtacaaactggcgatagcgtattcgcaatgggtaacccattaggattacaatttgctaactctgtaacatctggtatcatttcagcaagcgaacgtacgattgacgctgagacaactggtggcaatacaaaagttagcgttcttcaaacagatgctgctattaacccaggtaactcaggtggcgcattagtagatattaatggtaatttagttggtattaactcaatgaaaattgctgcgacacaagttgaaggtatcgggtttgctattccaagtaatgaagttaaagtaacaattgaacaacttgtaaaacatggtaaaattgaccgcccttcgattggtattggtttaattaatttgaaagatattcctgaagaagagcgcgagcaacttcatactgatagagaagacggtatttatgtcgccaaagctgatagtgatattgatcttaaaaaaggtgatattattacagaaattgatggcaagaaaattaaagatgatgttgatttaagaagctatttatatgaaaataaaaaacctggtgaatcagtcactgttaccgttatccgtgatggtaaaacaaaagaagttaaagtgaaattaaaacaacaaaaagaacaaccaaaacgtcaaagccgatcagaacgtcaatcacctggccaaggcgatagagatttctttagataatttacagacagaaaagtacattaagagcctactcattacattcttaggaatgaatatgagtaggctctaatttatttagctatgcaattatatttattgatagttaaccatgaagtattttttcttaccgcgacgaataatcgtaaattcgccatcaattttatcttctggtgctaaagcataattaacatcttgttgtctctcaccattaatataaatcgcaccattgttaacatcttcacgtgcttgtcgtttagaaggagaaatgcctgtttcaataaggacttcaacgatatttgttgtgtcatttgataatgtcacttgaggcacatctttaaatccatcttttaattctttcgctgataatgattttaaatcaccactaaataatgcttgtgaaatacggattgcatcatttaatgcatcttcaccatgaataaatttagttacttcttcagctaatgttttttgagcttcacgtaaatgcggtgcttcatttttagattgttctaagcgatcaatttcttcttttcctaagaaagtaaagtattttaagaatttaattacatcttcgtctgattgattaatccagaattgataaaattcataaggacttgttttttcagcatctaaccaaacagcacctgactcagacttaccaaatttcttaccatctgatttagttacaagcggaatagttaaaccgtatgcgtctgtttgaccatacatacgacgcattaattcaataccacttgtgatattaccccattgatctgatccacctacttgaatcttacaattcaattctctattcaaatgaccgaaatcaatagcttgtaaaatcgtgtatgtgaattctgtatatgaaataccatgttctaaacgactttggattgaatctttacctaacatgtaattaacgccgacgtgtttaccatagtcacgtaaaaaactaattaatgagatttgtcctaaccagtctctattattaacaagcactgcaccatggtctgttccaaattcaaaaatattgtgcatttgcttactaataccttcgatatttttatctacttgttcttctgtttgtagcacacgttcttctgatttacctgatggatcaccaatcatacctgtaccaccgccaattaaaacgataggacgatgtccatgttcttgaaaacgtcttaatgttaagaatggtagtaagtgaccaatatgtaaactatctgccgttggatcggcaccgcagtataacgtcacttgttctttatttaataaatcttcaataccttgttcatcagtttgttgataaataagacctctccattttaaatcttcaattaatacattcgtcattattatttcctcctatttataattatttattgaatacttgttaaaatactttaaagttttttgaacgtaaaaaaaacccttacaacaaatatgtaagggcgcgattgcacgttaccaccaaacttaaacataatcataagataatgttcactctattaatgatacgttcattaataaacgtaggacatgttagttataaaggtgtattcatattattaaaaacactagttcacagcgaccactagctctctgatgatttcaaataatattacttgtccttttatcctattctttatgcattttccctaattataattaacgttaaaataaaagtcaaattgcttaaatatggtatactatacgtaatttaggaggttaaagatgacgaatcaagacaacaatcatcaattgaatcatcgtatatatcattttgaaaagatatataaagctatcaaacatgtcattgtttttatatttatgattttcattgccatcgttgctatcgctgtgattgcgatgtctttatattttcatcatttaactaaaacgtccgactcattatcagatgatgctttaataaaaaaagttcgacaaatacctggcgatgaattattagatcataataacaaaaatttattatatgagtataaccattctcaaaactcactcattataggccctaaaacatcaagtccaaatgtcattaaagcattaacgtcatctgaagacactttattttataaacatgatggcatcttaccaaaggcgattttaagagcaatgatacaagatatttttaatactgatcaaagttcaggtggtagcacaattacacaacaacttgttaaaaatcaagttcttaccaacgaaaaaacatatagtagaaaagcaaatgaacttcgcctagcaattagattagaacacctactctcaaaagatgaaattatatatacatatttaaatatagttcccttcggtagagattataatggcgctaatatttccggaattgcatccgcttcatatagtctatttggtattccaccaaaagatttatcaattgcacaatctgcataccttatcggtttgttgcaaagcccatatggctatacaccctacgaaaaagatggaacgttaaaatcggataaagatttgaaatatagtattcaaagacaacattatgtattaaagcgtatgttaatcgaagatcaaatcactgaaaaagaatacaacgacgcattaaaatatgatattaaatcacatttgttaaatcgaaaaaagcgttaattgatgctcactttttaaagtaaccacaacaatgaatccaaatattaaaaacagcagtaagattattttcaattagaaaatttctcactgctgttctttttatttactctaaaggaaagccattaaaccaatcaatagtttataaattaattgctttcacattgtctacaaagttaatcatacatatgctatatttagttaattatttagattcttttctgaatttaggaatgaataaagctaacatacctaataacgcatataagccccaccatgattggcttgaagttgtttctccagtttttggtagcattttagattgactaagtttgttttctttcgatggtgtgccggctttttcttttgttttcactgttttatctacagttttatgaatatcactcggcagatgttcagttgtttttttgtcagtaactttgtctgtattattataattttgtttcactacgtcaagctttgctgcttttccagtatgattatttttatcggcaatatgattcagctgtatgactttgtctttatttttattagagtctttatcagtatcgacattagatgacataccaacgctattatcggcatctttatccacatttctatcagtatctttggcaatttgagtatccatttcttttaaatcatatttatcgaagtgattattatccgacatatcggataaatgatcaacatcatgttgcacatctttatcaatattattatcagcatctttaaccacgtcagactctggttctatcacatctgctttatcagacgcatctttaggatttgttgcagtgctgctattttcagctacatctgtatcagcaaccttaccttcttgtcctgtttgtacatttagcggttcactcgtgttattttgtgatgtatcatcatcttttgtattgatatcctgatttataattctgacatgatattgaccttcataaccaatgtttgccacaacgactttaacaatcgcattgtaaactgctttgtcaggtatatatgggaaaatcagcgttctagaattatttttaggatctttagaaacagtagtgacacgtttaccttctacaattaaatctttccagtaactgtcatcctttgttttcatcactacatatttttgaccatttaaagttgctgtatagaatggatgttcaacaaagccgtccataactgactcactattttcttcactttcaaaaacaacaaaatgcgcttcttgtaaatctgttaattgatcatttgtaggtgtaacattttcaaattccgtcactgctgatttaacttgatcagctaactctactctagtttgatctaatttctttttatattccgccttatatttttctggcaatttctcttgtaatttttctaattcataaacttgtctttctaacgttttagctttgtgatacggagctaataatttttgtaaattgtatgtttcttcatccacatagtcgtctgggttattagtaataggctgtgcaaagaccattagcgtataatcatagtcttcatggatgttctcaccatattcaatagatgacacaattttaacttctctcgtaccattagatactgggaaacgaatataggcataatctttatcagaatcatatgatactaattcgactggtaactttttgtcaccttcataaacttcaaatttcttccatgttgaagctgtctttaaacctaattcaattattggtcctgtttttgtaaaaatgacagttgctggttcaacagtactagcataatgatagaactgtctttcacctttatcatttttcatttgaaaatcaattggtcgccaattatcagctgtatgttctttatcgatgatagccgggtttttaattgcatcttgtagtgattcatctgctggtggatactgttgattaacatccgactgattacttgactcattcgttttatcgttagtattaccattagaatttgtttcatgagctggttggcttgacgcttgatctgcattcgttgacgattttggttgtgcaggttgactcatattggtcgttgcctgcggttgattattagcattgttgatcgttgatgtattttgattagatgtattcgtgtttgtttgattacttgcgactgaacttgattgatcattcgttactactgcatcatttgtatctgattttacaagtgaaggatcgttataaataggtttagcaaatactaatttagtataatcataatttgtttcttctccatcatcaatttgagtcgaagaaacaattttcaattcttgtgtgccatctgaaactgggaatcgaatataggcatggtcttctggtacaggactatatgatacaagtctcactggcaatttttgattgttttcatagacttcaaacttcttccatgttgaagcagtattgatgtctaattcaacttctgctttctttttagtgtaatacacatctgctggatctttgatgctgaaaaagtgatagtactgcgtttcattgtttttatctaataactggaaattgacttgttctcttggacctatatcatgttctttattttctaatgcaggatctttaattgcatctttaagtgattcatccgctgcaggatagtttttcgcagtgtttgctggttgcgtagcaggttgtgtttgatttgtatccttaggtggctgagttgtagttgcattattattttgattttccgagattttatctgaagtatttgtattttctgctgcttgtgcttgatgttgagaagtaattaaaaatagtgtactgacaatgaccgatgcaacgcctagagttgattttctaatagaatagaaagaccttaattttgggtgatgtttgttcatgttgttaacaactcctataagattatatttaattgataataattatcaatatcaattattagtgttaattgtagcgcatcccaattaaatattgcaacctattttattaatttttttaatatggaatattcattgcatcgctttcctattcttcaagcccactttttatcttcatatacattaattaaccaccttcaaacattgtcgttagattcgccaaattgaatctatttttagcacagcaaaaaaccgaactgctgaaataatgcatctccaacagtccggtctattaaactatttacttatctttattaaacaattgacatgatttattagaataacccaattgcatgaccatcatcagtaacatccatgtttaatgctgctggttttttaggtaaaccaggcatagtcatgattgcacctgtcaacgctacgataaatcctgcacctgttttcgcttctaattcacgaattgtaatttcaaatcctgatggtgcacctaacaacgtttgatcatctgagaatgaatattgtgttttcgccatacatactgggtaattatcccaaccattttctttaaattgttttaattgtttttgcgctttactgctaaacgttacttttgaaccgccatagatttcagtcacaatcttttcaatcttttgctctaatggtaattctaattcatataaaggtttaaatgaattaggttgatcaatgacttctaatacttcatttgctaagtcaacgccacctttaccaccttttttccaaacttcagttaaggcaattcgtacgttattttctttagcccaagattttacatattctacttctgcatcggtatcatgtataaatgcattaattgcaacaaccggttctacaccgaattttttaatattattaacatgacgctctaaattaacaattcctgcttttactgcttctacattttcttcttttaaattatctttcgctacaccaccatgcatttttaacgcacgaattgtcgcaacaacaacgacagctgccggatcaaatcctgcttcacgcactttaatgtccatgaatttttcagcgcctaagtctgaaccaaatccagcttccgttacaacgatatcagctaaatcacgtgctgtttcagttgctaaaattgagttacaaccgtgtgcgatattcgcaaatggtccaccatgaactaatgcaggtgtcccttcaattgattgtactaagtttggttttattgcatcttttaaaatcattgcaagtgcaccttccacttttaaatctgcaactgtaactggcttgcgatctctagtgtaaccaatagtaatacgactaattttatcttttaagtctttaatacttctacttaaacataaaatcgccataatttcagacgctactgtaatattaaagccatcttcacgtggtacaccatttgtaggtccacctaacccaacgtttacatgtctaagtgcacgatcattcatatctaatacacgtttccactcaatacgtctttgatcgattcctaattcgttaccttggtgaatatgattatcgataaacgcagacaatgcattatttgcagttgtaatcgcatggaaatctccgttgaaatgtaagttgatatcttccataggtaagacttgcgcataaccaccaccagtcgcaccacctttgataccaaatgttggtcctaaagcaggctctcttaatgcaaccataacgtttttatttaactcatggaatgcatcagctaaaccaactgtaaccgttgatttaccttcaccagctggtgttgggctcatcgcagttactaaaacaactttccctttgttttctcttggcgtaattttattaatgtcgattttagctttgtaatgaccataaggttctaatgcatcctctgaaatacctactgatgcagcaatatccttaattggttgtagtgttgattgattcgcaatatctaaatctgataaatgagtcaacttttttcgcccctttttgtttaatttatgcatttataatatgtaagttgtagctaagaaatttttacttacattcatataataacgaactgttaaaaacttgtcgactaaatcgggttagcgctttcatttttgcaataaattcacttattaaagttttgtattatacaacttttagcgcttgatactattgataactatatttttctattatttaaaataatcatcttccaaagatcatattaaaaataaaaagcaatataaagatatgccattattgttatgtcatcattttcaaatgctttctacgaaatgatatgacacaagttaacagttctttatattgcttatcgtaaagtaaacgattatttaaacattgacatgaaatatgttgtcaccctttattcttcgaaaaaaatcttcaataacattcatgtcattattccattgtacttaaatccccagcatctaaatttaattcccaagcttttaatacacgtctcataattttacctgaccgtgttttaggtaatttatctttaaattcgatttcacgtggtgctgcatgtgccgacaaaccttctttaacaaatatacgaatttcttcttttaattcgtctgttggttcatatccttttctcagtgcaacaaacgccttaattatttcaccgcgaaccggatcaggtttaccaataattcctgcttcggcaactgcttcgtgttcaaccaatttagactcaacctcaaatggtccaactcgttcaccagctgtcataattacatcatcaacacgtccttggaaccagaagtaaccatcttcatctttatatgccgaatcaccagatacataccagtctccaataaaatatgatttatatttttctggattcttccagatacgatacatcattgatggccagcctttttttatagcaaggttgcccattcgatttggtggtaattcattccctgcatcatcgataattgcagcttgaataccaggtaatggtttgcccattgagccaagcttgacgtccatcgttggatagttaacaatcatatgtccacctgtttctgtcatccaccaagtatctaacaccgttaaaccgtatacttttttcgcccattttataacttcaggatttaaaggctcacctactgatagaatcgaacgtaacgatgacaagtcatatttctcaacaatatcgtcaccagcactcattaacattcttaaagctgttggtgccgtataccaaatcgtcactttaaaatcttcaatcatactataccactgttctggcgaaaagcgaccaccagctatacaatttgtagcgccatttaaccatggtgcaaaaataccataagatgttcctgtaacccaacctggatctgctgtacaccaataaacatcatcttcttgtaaatctaatacatattttccagaaatatagtgcactaacattgcttgttgaacatgcaatacacctttaggttgcccagtagaacctgatgtataatgtaaaatcaaaccatcatccgactttaaccattcaatgtcaaattcatcgctagcagtttccatcaaactaatgaagtctatgtaattgtcttctacatcctcatctacgacaacaatttttttcaagtttggtaatttatctacaggtactcgaggtaacaatgccttattagtaattaacactttagcttcactgttctctaatctatccgcaactgccttttccataaatgcttcaaataacggcccaacaattgcaccaatttttaaaacacctaacaacgcaaaatatagttcaggtgtacgcgacataaatataaatactctgtcacctttgtcaacttctgcatgttcagacaaaacattcgctgctttattagataaccgttgcatatctttataagtatacgattcttttctgtgctcatctttgtaatttaacgctattttatcccctaatccttgatctacatggcgatctatgcattcatatgccatgttcatttttccagtttcactccaagaaaatgcttgttctacgtctttccaatcaaaagtattatatgtttcttcataatctttaaggttatgtttaccttgcgctcctttataaacttcgactttcatttgaaactccccctttgttatgtgaaaacgctttctttctcaatattatacataacatttctaattattcaaaatttttacttttatcctttttctagtattaattattgtaaattttctatataatgaatttaatacaatcacgacgtcgattgaggagttgaaaatatgaatcatttaaagacgtatcaatccgaagattattacattcatgacaagcaatttgttattgaaggtcctttaacacacgaagatttgaaagcgcttactttcgatgcgcatttaaccgcatttagagatgctgaagatcagtataaagctttgttagaaattacaacattaccagaaggtagaatttatgttgctcgccaagatcaactcattgtgggttatgtcactttccactatcctgatgaaattgagcgctggtctacaggtaagcttccatatttaatcgaattgggggcaattgaagtcagcatcaattttaggcaattacaacttgcagaaaagctgatacaacttagcctttctacaccagaattcgagaattatatcgttataactacagaatattactggcattgggatttaaaaaattcaaagttagatgtatttgactataaaaaattaatgcagcggttaatggcaactggtggacttgaaatattcgctacagatgatccagaaataacaagtcatccagctaattgtttaatggcaagaattggcaaaaacattacattagaacagcaacaagcgtttgatgatattcgttatatgaatcggtttttcttttaatttttggaatatcggagggattatatgcaacaacattcatcaaaaactgcatatgtttattcagataagttattacaatatcgatttcatgaccaacatcccttcaatcaaatgcgtttaaaattaacaacagagctacttttgaatgcaaatttattgtctccagaacaaatagtacaacctagaattgcaacagatgacgaattaatgttaattcataaatatgattacgtcgaagctattaagcatgcttcacatggcattatcagtgaagatgaggctaagaaatatggattaaatgatgaagagaatggtcaatttaagcatatgcaccgccatagtgccacaattgttggaggcgctttaactttagcagatcttattatgtcaggcaaagtattaaatggttgtcacttaggtggtggtttgcatcacgctcaacctggtcgagcaagtggtttttgtatatacaatgatattgcaattaccgcacaatacttagctaaagaatacaatcaacgcgttttaatcatagataccgatgcacatcatggagatggtacacaatggagtttctatgccgataaccatgttactacttattctatccatgaaaccggaaaatttcttttcccaggctctggtcactatactgagcgcggtgaagatatcggctatggacacactgtaaatgtcccacttgaaccgtatacagaagatgcatcatttttggagtgttttaaattaacagttgagcctgtcgtaaagagttttaaacctgatattattctaagcgtaaatggtgtcgatatacattatcgtgatccactaactcatctaaattgtacgttacattcattatatgaaattccatattttgtaaaatatttagctgattcttatacgaatggaaaggtaattatgtttggtggcggaggctacaatatttggagagtcgtaccacgtgcatggagtcatgtattcttaagtttaattgatcaaccaattcaaagtggttatttaccgttagaatggattaataaatggaaacattattcatctgaattattacctaaaagatgggaagatcgtttaaatgattatacctatgtcccccgcacaaaagaaattagtgaaaaaaataaaaaattagctttacatatagcgagttggtacgaatctactcgtcaataagtaacctaatctgcaacgattttaaaagataaataaaaggcattcttccaacacccatataatttgggtcgttagatgaatgcctaattttgtgaatttattttgtagttcctcggtattcaattctgtgaggtaaaactacatttggttcttctatcttttcatcgttcatatattttgttaataagcgcatccctactgcaccgatatcatataatggttgaataacactagaaagttgtggtctaaccatctcaactaatcgtgtattattgaaactaataatttgtaattcctctggaactttaataccagcatccattgcactatgcataataccaattgcttcttcgtcgctgatacataaaatggcatctggcaaattgcctttcattttggcaaaagcttttacgccttctttataactttcagcaccagaacaattcaatgtatcacctaattgaaggccatttttatttaacacttcagttaaaccttctaaaacatcttcttgagcttttttagaatgttctccacctactaaagcaaatgatttagcgcctttttcaattaattctcccgtaatttctttcgcagcttcagtaaaatcaatattaactgatgctatatgtgcatccttaccatttgttcctgatactactacaggtacagatgattgatttatcaattctttcatttcttcagtaattgtaccaccaaggaaaataataccatcaacctgtttacttaataagttattaaaaatttctttttccttttcaggatcgttatctgaatttgaaataattgagtgatatttatacattgttgcaatatcttcaagtccacgagcaagttgtgaataatagatattagatatatctggaatgatcacacctactgttgttgtctttttactagctaaacctctagcaacagcatttggacgataattcaaacgcttaatgacttcgttaactttatttttagtttctgctttaacattttggttcccattaacaacacgcgacactgtggccatagagacacgcgcttctcttgctacatcatatatagtaactgtcataatttcctccttgtaaacgttttattcattataataacatgttttcatttcattttcatagtttaccatattttaatttacagtaacatatttttgtttggaaaaatttagcgaaaagcttgaaataaaaacaaacgctaaatgataacgaacgatatattttaattttatataaacttttttcatttttaattgtaatgttttgagaaagccttttcaaatatcaattgcatttgttgaaaaatgttcacatttcagcaacaaatgtgtgaatctattatattttacagataattcatagttataattttaattactgctatcagtcataatctttaataattgtgaaattgaacaagtgtcgaagtattataacaatcgttaagtgcagtatacctttatttctatacaaaaaataatagccactctaaaagtaatatactcttagaatggctgtaagtttaaaattgtcgattcaaagataatattctacttcaacatgacatattagttaagtagtctatagtttccttggaatattattttaactttttagcgttatataaatcagctaaaggctttaattcatcataaaatgcttggaattcatctaaatccatttgttgacccgcatcactaagtgcaacagatggatctggatgcacctcagccataactccatcagcaccaactgctaatgctgctttcgcagttggtaacatgatatctttacgacctgtactatgcgtaacatctaccatgactggtaagtgtgtaccttgttttaaaattggtactgctgaaatatctaaagtgttacgtgtcgccttttcataagttcggattccacgttcacataaaataatgttttgattaccttgtgaagcaatgtattcagctgcataaacaaactcttcgattgtagcagataaaccacgttttaatagaataggctttttcgtacggccagcttcttttaataactcgaagttttgcatattacgtgcaccaatttggaatacgtctaaatactcatcagccacttcaaaatcatttggatttacgatttcgctgacaacatttaaatcatatttatctttaatctgtttaagtattttaagtccttcaacacctaggccttggaaatcatatggtgatgtacgtggtttaaatgcaccgccacgaataaatttttcacctttagcatgtaagtttttagcaacagcttcaacttgttcaaatgattcaactgaacatggcccaaatacaaatgatttattgccgtctccaataatgcccccattatcaaatgttacaatcgtatcttcaggtttcaacttacgtgatacatataaatgtttttcattttcagatttttgtaaatctgtagaggctttgaaaatttctttaaataattgcttaatagtattatcgttgaatggtcctttgttactatcgattaagtcgttaagcatttctttttcacgttgtggatcataaatacgtgtaccttgttttaatttttcttccccaattttttgtgctagttcaccacgtttagataataagtctaaaatttgatgattcagtgatacaatctcacttctgtatgattctaatttattactcatccttactcacctctactaattatttcaagtatattccactttaaagcaataaaatataatgttaaaaaatattctaacaatatcatatgtatagttcaaccctaaattgacagaaaataatcaattttctaattatatgattcgagactgacatttcgattttctcagtcattattggaaagttatattctatattgatatttattagcaaatgttaatcaattaaataagtgtcattattatagcttattttgagtcaacattactgcttttaagaaaaattttcgtttctatcttctattataaatctaaaattctcatacattcaacctaacgcttaataaaaattaacaacctttgtctttgtatattaatataaatctatagtgaacatcactcaccaacacattcagctatatttaaattagtgaacgtcattgtaccttctaaaattcattgtttatttgattatcgaatatttttccatcttcagcttaaaatgtgcaatatcactattgttatctaacgatgtttcaaacaacataaatacatgaaatgatcgcattgcctttcaaaataaactgatgatatcaaaaaaggtaagcacctgaatgcctaccttttattttgaaattcaatttttaaaaatatattacatagcttactgctatgattgattattcaacgattttagtaatcttagtcattgaatgtacgtttctctattttacttttagctttctcaactttagcatttggcgtttttgatgcattggatgatttagcatttgttgtttttgaattcttattactagtttgattattcttttgagttgacttacttgaactactttgtttctttgcaccttgtgatgatttcttattatgttgctttttctgacctgaagttttatttgtagatgcttttgatgcatttcgtttatttgaaggtgttgtttttttagattgtttacctgatttcttgtcaacagctgtattattagttgttttttcatcagctttacgtgtaataacaccattttcaaatttagcttctttttgtttaacagtgtctttattatctatattaaccgtctctgtctctgatacatcattctttttagtaactaattgaggaatttctttcaagtcatttttagcaactggtttttctgcaaataacgcttcagttaattgactctcttttgaacctggtgttaatttagcttgcttctgttttgcagcgtttgctaatctttcagcttgtgactctggttttgatacttctacctttgctgcacttgcatctttagttaatgtgtcactgtctttctctgcttgtgcttcttttttagcttcttgaacctcttgtgcctcttgtgatatatcacttaaattatttgcacttgcttcttcttttatcgctgcttgttgtgctttcaatgccactgcttttggttcttcatttgatacagctgcacttttatctgtttctgcttgtgcttcttttttagcttcttgaatctcttgtgcctcttgtgatgtatcactcaaattatttgcacttgcttcttcttttatcgctgcttgttgtgctttcaatgccactgcttttgattctttatttgatacagccacacttttatccgcttctgcttgtgcttctcttttagcttcttgaatctcttgtgcttcttgtgatgtatcacttaaattatttgcacttgcttcttcttttatcgctgcttgttgtgcctttaatgccgcttgctcatttttagatttgtttaaaaatccttcaacacgttcttttgtataggcaaccgtttcttcaagttgcgtttttctttcttcaaacttttgcgacagttcttgttctttgacttttaaatcatctgctttttgataaactttatttttaaaatacaaacctaaagctgaaccaacaagcgcgccagttataaaactaacaacaaaatctttacggtttggtagtggttcattttgataagtgtgtttattttttaatgttcttttatcattttgttgctgcgtcatttgtatatcctcctataacaaatgcacttaaataagtaacaacctcatttaagtgcatttgtttaattattaattatttatctactctagaagtatagctatgatttgcatcagttgctacattattagctttgtaatttgcacttccacgacggtagtgtctattttgccatttgtctgcaatttccattgcaacatttgaccattgaacaacttgtgagattttatcttcattttgagaaatattatgtgtaattgaatttgttacacgatctacagagctgtttaacgtttgtactgagtcaccgatacctttaacagcatctacaactgagtttaaacgatctactttaccttggatatcctcagttaaacggtttactttatgaagtaaatctgttgtttcacgagtaataccttgaacttgaccttctacaccgtcaagtgtttttgcaacataatctaagtttttcttaacagaatttaatacagctacgataccgatacataaaattaagaatgcaatcgcagcgataattccagcaattggtaaaatccaatccattaaaaacgcctcctaattaacatgtaataatgtcattaataataaatacccatactactctattataaacatattaaaacgcatttttcatgcctaatttatctaaatatgcattttgtaatttttgaatatcacctgcacccataaataaaataacagcattatcaaattgttctaatacattaatagaatcttcattaattaacgatgcaccttcaattttatcaattaaatcttgtatcgttaatgcgccagtattttctctaattgatccaaaaatttcacataagaatacacgatctgctttacttaaactttctgcaaattcatttaaaaatgcctgtgttctagagaaagtgtgtggttgaaatactgcaacaacttctttatgtggatatttctttcgtgctgtttcaattgtagcactaatttctcttggatggtgtgcataatcatctacaataacttgatttgcaattgtagtttcattgaaacgacgtttaacaccaccaaacgtttctaatgcttctttaatatttgtaacatctagcttctctaaataactaatcgcaattacagctaatgcatttaaaactgtatggtcaccatattgtggagacaggaagtgatcataaaactcaccatccacatacacatcaaaagcagtacctttatccataatttgaatattttgagcataaatgtcatccgaatctttaaatccataataataaattggaacatctgcttcaattttacgtagatgttcatcatcaccccaagcaataataccttttttaacattatgtgccatttcttggaatgcatcaaaaacatcattaatatctttaaaataatcaggatgatcgaaatcaatatttgtcataattgcgtaatcaggtttataacttaaaaagtgacgtctatattcacatgcctcaaaagcgaaataatcactttcaggcaatcccatacctgtgccatcaccaattaaaaatgaagtctttttatcaccattcataacatgtgataataaacctgttgtagaagttttaccatgtgcaccagttacagctactgaagtatattgatcaataatctgtcctaaaaaatcattataacttacaacatctaatttcaattgatgtgcacgtactatttcttcatggctactcgcgaatgcattaccttgtataactaccatatcttcttttatgttattagcatcaaatggtaatatttttatccccttatttctaagagcaacttctgtaaatacgtagttctcaatatccgatccttgaacttcatgtcctaaatcatgcatgatttgtgctaatgaactcatgccagaacctttaattccgacaaaatgatagtgtgtcattatataaaactccttactcataattattctttatttaaatctgcttccgtaacataaacatcccttggttttgaaccattagcactcgaaacataaccgagttgctctaattgatcgataattcttgctgctctattatagccaatttggaaatgtctttggattaatgatgttgaaatatgtccttcattaaccataaatgcacaaacatcatcaaataattcatcttgtgattgtgtttgtgtttttttcaacaattctttttcttcaaatagatagtccggttctctttgttgtttgataaaatcaacaacatcatcaatttcgtcatcagaaacaaatgtaccttgaactctaatcggtttattcataccgctaccaagatataacatatcgccatatcctaacaagcgttctgctccaccactgtctaatatcgttctcgaatctacacttgatgataccataaatgcaattcttgttggtatgttggctttaattaaacctgtaattacattgacagatggtctttgcgtagctactaacatatgaataccacatgctctcgctttttgagcaattctagcaatagactgttcaacttcttgcggagccatcatcattaaatcagccaactcatcaattacaatgacaatttttggcattctttcatcatatggtgcttttttgttaaatgctgttatattacgtacatggtaatgtgcaaataacttataacgtcgttccatttcttctacggcccattttaaactctgtgtagctgctttgacatctgtaattaccggtgcaactaaatgtggcaaaccattataaggagctaattcaaccatttttggatcgataagtaataatcttaattcctcaggatgatttttatatagtaaagacatcaaaatactattgatacaaactgatttccctgatccagttgcacctgcaattagtgcgtgtggcgttttagcaatatccataagtaatggttcattattaattctataccccatcgcaactgttaatttagattcagcatttttaaaacttggagattcaataatagaacgtaagttgactgtcgttggattttggttcggaacttcaataccaacacgactagttcctggaataggcgcttctatacgaatatctttcgctgccaatgccattttaatgtcatcttgtaatgccgtaattcttgaaactttaacacctttttcaactgataattcaaatcttgtaacacttggaccttcagttacatcttgtacttctgcaggtacattaaagtaaaataatgcgtcattcagttctttctttttatctgtaatccagtcctcgtccgactcaataacttgtggttcttctagtaatgaaacacttggcaatttaatatttgggcctttacgaatcatcggcttagatgtttgtacagcttgatttgttgcaacatcttgttggttcgtccgaggtctattttcattagctgtatcttcatttttatttgaaaatgatgactgtaaatctttttgttgatcatcattatcttgttgtccactagtattgtttggatgtgttgtttcttcgctttcttcagttatgtcgcttacttctgaaactgaagacgaagttgattgatcaacttgctcattttccaattgattatcatcttgactttcttcaaatatttccgtttgagttgaatcaacagaaggtttctgctctgaatattgttgtgcattttgataatcattttctgtttctgcatgaccaataagttgattgttctcaacattgtttgatgtcatattatttgttttatatgcatttgtatttgactcttgtgaatcagatcttgatgatggtgtggcttgactcgcaggcattctttcactcacagcttgcttactttgtacaggctttaattcaggcacattgacttttgaatgctttttacgatccatcatacgctttttatcagatggcgtcatgacaacattaaatggtcttttacttaaagttgaaaccttttcagtctgtttctttggatttacgttttcaatagttttctcttcgacattttgttcactttcagctgcttcgttttgcacattttctgtaatttctgcgttattcttttctatttcattcatgcttgaatcttccacaacatgattatcattcacatcattcgttttcaatgagttgacacttaagtttgtttggtcatcttttttatgacgcggtgctaattcaatttcattatcaaccgttttatcgatattatttacttgagattcagttactgcgtactcttgcgttttaggagcgtctacatgcatttcagacgcgtttctattggtattatcttcgatatttgaagtagtatcctcatctacttctgtatcatttaattcataaaattctgcatcatcgatttgacttcctgaatattcttctttattcgttgctccatcttcttctgaatcagcaattaatctggattgattttttagttcatctttatcatttacttcaacgttatgttgtagtgctgattgatgttgagacgttacattcgaaaccgtaacttcatcatctgacaattgttttgttgtcgatacttgattcaaactaacttcctcataattgtatggactttcatctacatgagtgtcattagtgtcttcattttgtattgacgcttgtttattttcatcatttgatacagtttcattctctatgccatttgtatgaagctgactagcatctgtactattatctgttaagtcactatcatcatttaatgaactatcaccaacatagcgttccgcttgtttagcatacatttcatcaattgcacgttgtattgcatcttgctcttcgtttttatgttcttcacgcttttgttgcaacgcttttttaaatcgacgcttttgaagcactttacgttctcgttcacgtctaatttcttcaacaatttgtgaagcataaatattttcaattttgatagtattatcaacttttgaataattaggcattgattttgttgttgatgatacattttcatcagatgatttagatgcagttccttgtttgacaacactatcattttgtttttcttgttctaattgtttattttgagacgtttgcgtcttagctacatatttatcatatttttgtttatctgactcaactttttctgaaggtttacttacagggatacgaccattttctaactttttaggtttcattgtgccaaaaatagctgacggtacctctgaagtcttgaaactttctttgtgataatctggagttgaatctttagcacgatgatttgtattattagaatacatattatgtgtttttggcttgtgcgtttccttctcaataccattaattgcagaaacatatgtacctggcttattcgtatggtaatgtgaatgatctttatattttatactttgctgtgatattttagaattcccacgttgttcactataattttgttcttcagttgtttgatttcttctacggcgatgtcgtttttgtgaacgagaatcgtggctttgtttgcgatagtctcgatggtattgttctttttcatctgaaatagtatctgcagattgttcaacattttcattttcataagctacgctcataggaaaacggaattttcccctcggacgactataaatatcattattttgaggcagtaatgagtcatgatcgttatctatattttgtgattcttgacgtctttttttctttctatgaatcaagtcatcatttgaatcattatcttcgccgaataatttatcaaaccagctcatattttcactaccttccttaattattcaaaaaatgcttgtccaatttcatagctgtcatttaataccataatacctttttcttcaggtgcattaggtaaattcaattctttcattgaacaaatcataccgcttgaggcaacaccacgtaattcagcatctttaattaccataccgctaggcatcactgcacctactttagcaacaacaactttctgtccagcttcaacgttaggcgcgccacatacaatttgtaatgtgtcatttccaacgtttacatttagtacacttaatttatctgcatcaggatgtttgtctttagtttcaacgtagccaactacaaatttcggtgatagatcagcatttaatttataatcaaaaccagcttctgaaatacgcttttggaatacatttacaagttcatcagttaatttaatatgacctttttcttcaattgttatatcttttgaaatttcaaaaatattataacctacaacattaccttcattagtaatttcaacaacattaccttttttattgtagtttaattcaccttcaactggttcaatttgtaaaaatgcgacatctcctacatatttaggattgtaaaataaattcattatgacaaaactccttatccaattatttctatttatctttattaaatttacgacgatttgcttctaaacgctgaatcacgtttggatctcttttttgtttattatttttacctaaaataaatatcggttcaagatgaccctgtttatatccaaaggataatgatgtaattggaactagacctttagtgaaaaattccattgttaaatgtgccatcacatcatatcctgttttattgcgtatatctgcaataattaacacatcttggtgtggcactgctacgagcatttcgccttgacattgtgcctcaatttcatttaaaaatgcagtatttagtatcctacttgcatcatacccgtcatttgagttaataaaataaaaaatattaccttttacttcatcagtcgtatatgaatttgacaattttctaacattaaacagagacatttctcttatttgttgttcagttaacttcaaatcctctaacatgctttcgtcaattagacgatatgatttccctaaatcgactgcataataaactgctgtttctgcagtatgctcatcatagataaaaggaacaccttgtttagtttttttatcaaagctagtcgctctaatgacaggcataatttgactagatgatatactctcaagggttttatctgccatttgtgcaatagcttcatcaacgtaataaacaatttcatctacaattttttcttttttatcttcatattttgcgactatagcgttaagtttaatcgtgatacctttgttattatctgttcgataaatacgcaaagtttcttcttcacgattaaatttaaaatcaacgtctaaatggcttaaacgttcctttaatttatctctcatttgaaaggtattcatatgtaacactcctaatttcgcaccttataatagtttacaataaatcaacacatagtaacagagaaaaacgagtattaccccgtttttctctagtctaaattacacgtattgagctaaaaatgcatctatctgttcaattgattttcgttcttttccaatataacttccaagcagttctccatttttatatactagaaaacttggaatacccataataccattttcaatacaaatatccataaatttatcacggtctactgatacgaagtcaaacataggatatctcgcttctaattccggtaaatctggttctatcactctacaatctggacaccagcctgcagtgaattcaaatactgtagcaccttgttttaaagattcaaattgttgttctgattcaagttgtttcatttttatgtctccttaattaatgattatatataactatttagagataatagttgttattacccgattatttatattgtaatgtttctatttgattattatctaaattacaaatggcttctgaaagtaaagatctagctgcaaaatagtctcttatatcaaatactgagtctgtactatgaatatatcgtgcacatacaccaataactgcagtcggaataccaatattagctttatgaatttctccaccatctgttccacctggtgacatatagtattgatgttcaatgtcatgtgcttctactaactttaataaatagtctctaaatacaggctttaaaatcattgtaccgtcttttatgcgaattaacgtccctttaccaagttcaccagataatggttggtttcctttaacgtcattggcaggtgaacaatcaactacaaatgcaacgtctgggtctatcatctctgcagatgctttcgcacctcgtaatccaacctcttcttgaacatttgcgccaacatacaagtctacatctaattctatatcttttaataattctagtatttcaattgccaagacacaaccataacgattatcccatgctttagcactatatcgatgttcagataactgtgtgaatggcgtgtgaggtacaattgtatctcctatatctattccgcgctcacgcacctcatcttcattttgagcacctatatctaatgttaaatctttaatttccggtgcaccttcactaccagtacgaaaatgtttaggtatattagaaacaacaccgataattttatcgccatttctatttttaattactaagcgttgtccttgccaaatatcatttgcaacaccacctaaatttgtgaattgaatcattccatttttagtgatatttgtaatcataaatccgatttcatccatatgtgctgcaatcattacacgttttgcatttggatttttagattttttcacaccaaaaaatccacccatacgattttcaataaattcatctacgtacggcgccatttgctgagtcatataattttttacttcttcttcaaaacctggtgccccatgaagctcagttaaagtttgaattcgttgtaatgttacttttttatttatgttcataaaagttctcactccttataagttattatatcatcttcaatatggtaaactaatgatatgaatttgaaatcaagggagcataaatgatgactaaactgaaatatataattccaacaataattgcagtagccattgtaattatttctaccatttcaatcatccaatttattaatcgtaaacgctataatcccgttaaagtacttaatgaagtaaaatcatattttatgaatgtcaaaggctcatatatcgtttatgaaccattcgttcatcctgaaactgataaataccgtttagtttatcaaggtggaattacaactattaaaaatggtcaaaatattcattatgatttttatgcagatgcatatactggtgaagtcattaacattgtagagcgttaatacgaattttatccatatttgatttggatcgtaaaacttaaaaatgagccacaccctaattagtaagattggatgtggctcaattttttatttttgaaaatttgtttagtaatacatctttattttagttattatcaactaatgtttcacgtaaaatatatgcatctatgttttcaccattatcgctgtattttacagcaaagtagttttcatcatgataaaacaagaaccaatattgttgctgaataaaatatggtatcatgcgttctttttcacgaatcgattgcataggataatcatcatatgccgttacccatagaggatttttatgtgcagtagttgggaatatatcacccatatgaactgctttatctccttgactttcaatcgtaataatcgtgtggccaaagctatgacctccactatgttgcatcttgatacccagaaccggttcaaaatgtttttcgaataaaatcaacttgttactataatcgcctttattcttatcccagtaagttgatttacttcttatattaggtgcaataaactcatgccactcatcttgttgcacaacatgaatcgcattttcaaaaattgcatgtcctgcttgatcagtcaaaccggcagcatgatcaaaatgcatatgtgtcattagcacataatcaatatcctttggcgttaaattataatttgccaaatcagcaattatatgactttcttcatctactccaaaattacgtaattgcttttcagataatttaccattaccaatacctgcatctataatcaaattatattgagccgtttgaatcaaaattggatgtgtcggtaaattgatttgatttcgttcatttgcattgtattgctttgaccacaacggcttcggaacaacaccaaacattgcaccgccatccatttttgtattgccaccatttagataatgaatagatatatccccgattttcataacatcacctattctttctgtattcgttattacaattagcatgtgtttattacatcatatcactattcataaatgcgaacaaaaacgaaacgccccacactaatacacttctaactacttataaagattaatgcaatcatattatatgtaaatgcatcataaccatcggcctgtatttttaaattaataattaaaatttacaagtaaaatgcaagctttattcttttaaatcaaaggtatttagtataacattgttcataggcgcattatctcctttagttatttgtttagtcacttttaattatagagataattgcgctttttttatattcaaaatcaaaaaatcggacagatgaaaagttaaaaactttttccatcagtccgatttattatagaacctttatctatagaaccattatagtacgaaaaaacacttatgattgtatgtgtacataccctcataagtgctctatttttgtgaatggaatttcgcttccatacgataaatacgtgaccctttatccgaaaatttcttttcatattctgttaaaatattactgccatcgtcttcttgatgtaaatttagatttatttttgtaaaatacattccaaattgagacatactttctaaactgtaggcaaatagtcctctgttatcagttttaaaatgtaaatctccttcatcatttaagatttgttgatacaacgctaaaaacgtatgatacgttaaacgtcgttttgcatgacgattttttggccatggatctgaaaagttcaaataaatacgcgaaacttcgccgtctttaaaatattcatttaattcaatggcgtcattacaaataatctttaaatttgttaaacccatctctttaactttatccaatactttataaacgatacttttctcacgttccattgaaatatagttaatatgaggattttgagcagctaatgttgtaataaactgccccatacccgaaccaatttcaatgtgtatcggttgcgttttatcaaaccattcagtcattttccctgcatgttgaccgtccatgtcaaccaattcaggatgatcttttaaataatcttcagcccatggtttgtatcgaactctcatattttattctcctcttaaataaacatgttactattcataacttcatttaggaatttaagccaagtgttcatatccttatatcttttttgctcttcataccattgaacaagacctatagattgaattaccgtataccatttcatacgtttatttaaattcaagctctcttgaacaccatatgtttcaagccattcagaccattgttgttgtggaacatagttgtaaagcagcattccgatatcaattgccgggtctgcaatcattgcaccttcccaatcaactaaaaatagttcatctcgatcggataataaccaattattatgattcacatcaccatgtacaacagtgaaaaaacgcgaatctaaactcggtatatgctcttctaaataggttaatgattttctcacaatatgatgtgttaaaacttctcttgataaagaggcattaattttattaagcataatctcaggagtaataggttccatttccatacgctttaacatacttaataaaggtctagaattgtgtatcttctttaataaatgtgcaactcttgtttgcttcatttcgtttgaagatagttcacgcccatttttccaatgttgtgctgtaacaacctcgcctgtttctatgcgtttcgtccatactaatttgggcacaataccttctgctgataatgccgcaataaatggatttgaatttcgttttaaaaacaacttttgtccatcttgttcagccatatatgcttcaccagatgcaccacctgctgaatcaagtgtccaccctaattgataaaactgctccaactcgtccacctcactttcaattagaaaatggctctagaaataggtttttcaagagccatatattctaatttataacaccatactggtacaaatattatgtccagataattattgtaaatcctcaaccaatgcctacattacacgactaaatttaaatcgtaatgtctgtcattgacaccatacattctatagtcacttacttgacatataatgttaccgtgtctaaaactacatgtttttgaatctctgtaggcgataaactctagttttcaaaataattgctatcccattttcatggttagcataaatttatgaactgtaacatttacgtacttagtaaaatatgatgcacatcatatttgtaactcatagaaaattttataatttttatcattatatttcaactgaaaatgagaaacaaaatggcactttttactaatatgtgttttctaaacaacacttttaagcttcgttttaaattataacataattcacttacgaaagttgataaatttaagtaatttaatctaaaaatatgatgaaagaattttaaatactgtgtgactctatatacttttcaaatccttcttgtagttgacgtgtaattgggccaactttaccatcattaactggttcaccatctaatttaataacaggtgtaacctcagctgaagtacttgaaacaataacttcatctgcgtttttcaagaaatctacagtaaacgtttcttctttaaatgggatgttatagtcttcggcaatttttttaattacaattcgtgtaataccattaagaatatagttgttaatcggatgtgtataaatcacaccgtctttaattgcataagcattacttgaagatccttcagttacagtttcacctcgatgttgaattgcttcaactgcattatatttcacagcatattcttttgctaatacatttcctaataagttcaagcttttaatgtcgcaacgtaaccatcggatatcttcaacggtaacaccattcacaccattttctaaatgatcataaggacgatcataactctttgtataagcaacaattgctggttctacttcaggtgtcgggaagctatgattcctttcagctacaccacgcgttgcttgaatataaattgccccagtttcaatttgattcatatcaactaatttacgagatagttcaattaattcttctacagaataatttaaatctaaaccaatctcattggcactacgtaaaaatctttcataatgttctgttactgtaaataacttaccattatatactcgaatgtattcataaataccatcgccaaatacgtatcctctgtcgttgtatgaaacctttgcttcacttggacttacaaactcaccatttaaaaaaattttttccatatattattcctccacgcataatgaataaattgcttctaagtaaatactagttgcgttaaataactgttttttagtgatatattcatttttctgatgcattaaatcttcagaatcactaaacattgcgccaaatgctacacccttgtctaagtttctcgcataagtaccgccacctatagtataaggttcagtcatatcatttgtttgatttctatatgcagtaactaacttttgtacaaaaggatcatttttatcaacataatgtggtggttggactttacctaatttcacttcaaagccatattgttgaatctcatttgcaaaacgatccatagctttttcaaattcaaatccttctgggtagcgtaagttgataccgaaaagacctgcgttttcattatcatatgtaataacaccaatgttagttgtcacgtcacccatgacatctgtatggaatttcattcccatcttttcaccaaaatctgaattaaataagtagcgattactaaatgctacaaacgcttgtgcattattatcaagatttaatgatgctaagaattttagtaagtaaagacccgcattcacaccgatagatggatccataccatgaaccgctttaccttcaactgttaaaactagaatgccactatcaacagtactatcaccttgtaaatgattttgttctaaaaagtactcaaagtcttgaataacatctgtcatattttctttaacaagcactcttgcttctgcatgatcaggtaccatgttgtaacgttcaccagatttaaaagttattaattcataatcaggttcatcttgatcttcagtaagtttattttgaactaaatcaaatgttgtaatgcctttttcaccatgaatacatggaaattctgcatctggtgcaaaacctaatgttggcatttcttctgttttaaaatagcgatccgtacatttccaatcagattcttcatccgtaccaataatcatatgaatacgtttcttccaatccacattcatatcttctaatatcttaattgcataataagcagcaattgttggacctttgtcatcaagtgtacctctagctatgatagcatcttctgttacaaccggctcgaacggattactatcccatccatcaccagcaggaacaacgtcaacatgacataagatacctaatacgtcatttcctttacctgcctcaattcttcctgcaatatgatccacatcatgtgttgtaaatccatctctatgtgcaatttcatacatgtagtctaatgccttacgaggacctggaccaactggtgcgtcttctgatgcttttgcatcatctctcacactttcaattgctaataatccttttaagtcattaatgatttgatcttcgtattgttgaactttttctttccacattcgaaatcgacttccttttttctataagttaaattctattttacatgaaaagatataaaaactacaataagatgtcagaaaataataaaaaggaacaaaacgatgctattgatatgacacaaatcataaatagctgctttgttccttttttaatttatatatttaaaatacacatattcaagagctcgagatataagtcaatgtactaggcacacaatttaatattgacagtaattaaccgaacgaaaatgcgccccggggccccaacatagagaatttcgaaaagaaattctacagacaatgcaagttggcggggccccaacatagaagctggccaatagttagctttcaataatgtgcaagttggggtaagggccccaacacagaagctggccaatagtcagctttcaataatgtgcaagttggggtaagggccccaacacagagaatttcgaaaagataaagaaatacgttttctttagatattagtatttcttatgaatgagtttcacgcatgtattcttctttctatatgcatattagctatgactaacgataaagaacctgaaacactaataaatgtcctatagtttacaatattatattggcagtagttgactgaatgaaaatacgcttgtaacaagcttttttcaattctagtcaaccttgccggggtgggacgacgaaataaattttgctaaaatatgatttctgtcccactcccttatcatttctgtcctactcacatcttattctttatcagataatgcatttttattcttttttaaatcttcttcagtgacgatacgtaaattattatttggtgctgcgccaccttcatcatcaaatttacctttttcaatactttcgtcagtcttattgtcatattcggtaaattttgatttttcttctttgaaaaatgcttttggattattttttaatctattagcatattctttcggatttgtttttacttctttaattgtttcattagcaattgttcctaattgcgtcgctttatccttagcattatctttatagctttgaggatcttgtttatatttattatattctgctttcagcttgtcacgactatctttacgtgtaacaagtacagctgctacagcgccacctatacctaaaatcgctttaaataaattaccttttgccatatcaatcgtctcccttttatttataatttaatttgtcaaaatcattttcagttaataaacgatattctcctgaatctaaattgctgtccaattctaaatcagcaattttgatacgtcttaaatgtaatacctcattttgaatgctatgaaacattcgtttaacttgatgatattttccttcataaattgttacgtgtgacgtttgattatcaatataagttaatattgcaggcttaaccttgccatcagtcagtgttacaccctctttaaaagcttgaatgtcgtcttcagtgataggatttgctgaaataacttcatattttttagaaacatgtttgtttggactcattaattcatgattaaaatcaccatcattcgttatcaataaaagcccttctgtatctttatcaagacgaccaaccggaaaaatatttagatgttggtattcaggtattaaatcaataacggtttttgaatgatgatcttcagttgctgatatataaccttttggcttatttaacataatatagacattttcaatgtattctattaattctccacgaactgttatcttatcgttttctggttctatatgtgtttttggtgatttaattacttgttcgttgacatttacaaggccttttttaagtaactgtttgacctcattacgtgtaccgacgcccatatttgctaaaaatttatctattctcatcgtaaaaacctaactctacgtcttaatttttcaggaatttcacctaagaattcgtccgcaagacgcgttttaattgtgattgtaccgtaaattagaatacctactgtaacacctaaaataataatgattaagtaaccaagtttagtaggttctaagaatagatttgcaaggaaaaatactaattctacacctagcatcataataaatgaatacaagaatatttttgcaaaatgaatccaactatagctgaatttaaacttcgcatattttttaagaatatagaaattacatccaattgcaaataataatgcgatactagtacttaaaattgcaccaggtgtatggaataacataattaatggatagtttaacgctaacttgataactacagaagctaaaataacataaactgttaatttctgtttatctataccttgtaacattgatgccgttacacttaatagtgaaattagtattgctacaggcgcataatagaataataagcgactaccatcatggttagggtcatgacctaaaacaattggatcgtaaccatagaaaactgtgaataatggttgtgccaaggccataattccaatactagctggaacagttataaacattaatacaccaatagatgttctaatttgatgatgcatttcatgtaagcgaccttctgcaaatgtttttgtaatataaggaattaaactcactgcaaaaccagcacttaatgatgtcggaatcattacaattttattagttgacatatttagcatattaaagaatatatcttgtaactgtgaaggtataccaactaaagataaagcaccgttatgtgtaaattgatctactaagttaaataatggataattcaaacttacaataacgaacggtatactataagcaataatttctttatacatcttgccatatgacacatctatatctgtgtaatcagattcgaccatacgatcaatattatgcttacgctttctccagtaataccagagtgtgaatataccaataatcgcaccaactgctgctgcaaaagtagcaataccattggctaataaaatagagccatcaaagacatttagtactaaataacttccgattaatatgaaaatcacgcgtgcaatttgctcagttacttctgacactgctgttggccccatagatttataaccttggaatatccctctccatgtcgctaatacaggaataaagataacaaccatactaatgattcttataatccaagtaatatcatcgactgaccaaccgtttttatcatgaatgtttctagctaatgttaattcagaaatataaggtgctaagaaatacagtaccaagaaacctaaaacaccggtaatactcattacaataaaactcgatttataaaatttctgacttactttatatgccccaatagcattatatttcgcaacatatttcgaagctgctaatggtacacctgctgtcgcaactgcaattgcaatattatatggtgcataagcgtatgtgaacggcgccatattttcttgtccaccaattaaatagttgaatggaatgataaaaagtacgcccaataccttggtaattaatatactaatggtaattaaaaaggttccacgcaccatttctttactttcactcattacgaatctccctatctcatgtttattaaagttttgtaaactaaaagctgtttctctgtaaaatcatttttcattattatgaatatatcacaaaactttatttcattgtcgtatattcaatgaattatcataacaaaattatcaacacattgtcattgaatactagattttgattagaatattacgaaatttcatataaacattatactactatttgagatgaacatcgcataacagtagaaaaatcattcttatcatacacatacatcttcattttttatgaagttcacattataaatatattcaacataattgtcatctcataacacaagagatatagcaaagtttaaaaaagtactataaaatagcaattgaatgtccagtaacaaatttggaggaagcgtatatgtatcaaacaattattatcggaggcggacctagcggcttaatggcggcagtagctgcaagcgaacaaagtagcagtgtgttactcattgaaaaaaagaaaggtctaggtcgtaaactcaaaatatctggtggcggtagatgtaacgtaactaatcgattaccatatgctgaaattattaagaacattcctggaaatgggaaatttttatatagtcccttttcaatttttgataatgaatccatcatagatttttttgagtctaggggtgttaaattaaaagaagaagatcacgggcgtatgtttccagtttccaacaaagcacaagacgtggttgatacattagtgacaactatcgaacgccaacatgtaacgattaaagaagaagaagctgttagtagaatcgaagttaatacagaccaaactttcactgtacatactcaaaataatagttatgaaagccattcgctagtgattgctacaggtggtacaagtgtccctcaaactggttcaactggtgatggttataagttcgcacaagatttaggtcataccattactgagttattcccgaccgaagttccaattacatcagctgaacctttcatcaaatccaatcgtctaaaaggtttaagtttaaaagatgttgaattgtcagtacttaagaaaaatggtaaaaaacgcatcagtcatcaaatggatatgttatttactcattttggtatcagtggtccagctgcattaagatgtagtcagtttgtttataaagaacaaaaaaatcaaaagacacagcacatttctatggcaatcgatgcatttcctgaattaaaccatgaacaattaaaacaacacatcacatcattattatcggacacaccagataaaatcattaaaaacagtttgcatggtctaattgaagagcgctacttactgttcatgctggaacaagcaggaatcgatgaaaataccacatcacatcacttatcaaatcaacaattgaacgacttagtaaatatgtttaaagggtttgtatttaaggtgaacgggacattacctatagataaggcatttgtcacaggtggtggtgtgtcacttaaagaaattcaacctaaaacaatgatgtctaaattagttccgggattatttttatgtggtgaagtattagatatacatggttatactggtggttataatattacaagtgcactcgtaacaggacatgtcgctggattatatgccggacattactcacatgcatcaatggaataatagtataaaatttggttcgattctctttagtagatcaactttttcattcaaataaaaatgaccttaatataactgagtcactaaaaagtgtcgttatattaaggtcatttcgttaattatgattctttttcgtttttagtacgtcttctagctaacaaagccgcacctgtaatcagtgcaaattctttcaatggtaaatccattccttcagaacctgtatttggaagttctttttcaactttgcgcgattcatgtgtctcttcttttttaataggcgtacaaacttttggagctggctgaatttcttttggtgatactttcgtcgcttcagctggtaatttaattgctaaaatttcatcaacaatgaattgcgtgtgttgtttgatgtcatttaatgtcgcatcttcatcaatcattctattgccatctgcaacatattgatcaattaatacttttactttagctaattgttctggtgttgcgatcgctttgaatttcgcatatgtttgttgagcaatgttatcaattcgcagtaagctattttctttttcagtaattactgcttctatatcgcttaatgcaacattaaatcgttttaaaactgcatcaacatcagcattagtgcgtgctgtttttaattcttcatccatttgtaattttaaagcagttatagcttttaatgcatcagccttattacgattacttacttttcgataattttgcactaaagcagtgacgcgtgcaagatcatcattaatcgttttttcagcatctggctttttaataggatgtacatctaaatcatgtattgtttgtagatttaatgatgctgttttatcaacttgtgcattgctacgatcttgatcaatttgtccaatagcagtgtcataaatattttgtaactgtgctaatatactatttctttcttctaccgttgcttgaatattcgcttcaattgcttgttttttatcgttgaataatgttgtcaattgttctcgagcagacgcctttctgttaataacaggttcgatttcacgaatttcgtttttctcatcatgcaataaatatgccacatctgcattagtcactgcactagcaatttgttgtttagctttaattaactctttttcaacttgtgctattgcaatattttgttcttcatctgtcgcttcgttatttgctttaattaaattaattttatttgtagcgatattttgaatttgttgtaatgctgttgctttaactgttgtcgctggtttaatttttgaaataatattttgagcatttatactatcttgattaacttgggcagtcttatctgcatgattgatctgatcaatagcctgattaagtgcttgttctactaaatgtttagcagctagtctttcttcttcagttgataaatcgctttgatcgattagtgcattttgagcttcggcttttacaccaacagattgacgcgctgctggtttaacttgaactttaggtaaaatcactttgatgttgtcgttgccatcagtctcagttcgatccacttctgcattcgttttgttttgtgcaatgtcatttttaattgtatttacaattttatttaaagtatcaatagcaacatctctttcatcttgagtagtatccaacgtatttcggattgcatcgagttgatttttatcattttcttcaatgctatcaagcgcagctcgtttacgtcttactttaggttttatttgctctattgccttgattgtttgatttctaacatcagtaacagcagcatcttgatttgtattttctatttcttgttgcgcttgtttgagtgtgtcgctaattaattgattcgcttcatctaattcatcaactgttgcatgtggtgtatcttttattgattctacttgattttctgcacttgcttttattgcttgttgtgcttcaggcttaattacaatatgaggttgtacaccttttagtgtagcaatgccatttgtttcaacacgtttcacatcattattcgctattgcttgatcgatgttttgtaatgcacgtttttcattattcgctaattgatttaaagcaacttgtttttcttcatcagtcgcatgttccgcttgctcaatttcgcgctttttagcttcatattgttgcttaactgcatctctagcagctgctctaacaatatggtcaggcgtcactaaagcaatgctatcaagcgcttgacttgttgtatcatcaacttgttgatttgttctattattcgtaatatctgtcatggcttgatttacaaattcattgattttatctagtgctacttgtctttcttctgctgttgcttctttatcctgattaatcttagcacgtaattcattcgctttttgattgattttttcacgtgcagctggtttaacttttgtttcaggttgaataattttaatcgctgatacaccatttgttgctgcttgattcacctgactattcgtttgagcttggtcaatagctgcaagtgctttttctttttctttagctaatgcttgtgaagcaacttctttctcattatctgttgaatcaagactattatcaatttgctgttgcttttctttaacagctttttcaatatctgcaattgcctttggtttaattactacttcagcttcaacattatctatagcatttaccgcttgatttgtagttgtgtctacctgatcatttgtttggttttgattaatttgattaattgcttgatctttaagttgattgatttgattaacagcagcctgcttttcttcgtcagttgcattaggtgtttgtttaaccgcttcaatacgcttcgccacttcagcagtgattttatctcgcgctgcttgtttttttactacatcaacttgaacagcatcgatattattctctgctactgtcgcagcttggtctacttctgcatttgtgttagcttgtttaatactttcaatagcttgttgtctgtcttgatttaaagtattgatcgcagcatttttctcatcattcgttgcatctggtgtagcattgatttcagctaatttagcattataatgctgattgatttgtgctaatgctgcaggttttttaacaatatttggctgaatcgcattaattgcttttgtacctaattgttgcgcttgatctacttccgcatttgtatcagcttgatttatattattaattgccgttgctaactcttgatccacttgatttaaagccacttgcttttcttcagttgttgcatttgtgttttgattaatttcttgctttttagcagttgctaaatcatttaatacacctgtagcagtttgtttcttcgttacatgcggttgaactgcgccgatttgattgactgcatcgtctctaatactattgaccatcgcagtagtagacgtcacaccaatatcagttaatgctctatttttaagtgtattgacacgatttatcgcttcttgtttctcttctcgagtcgcgccagttgtagcattgatatttgttatcgcctctcgcgctttatcatttacaacattgcgagtatccgttttaacttgtgttgccggttgaatcactactatattttgtgtgccctgatcttttgcttgtgcaacttcttgattcgtatctgctgcattaatattttgcttcgctgtggctacagcttgatcaagtaattgttgtgctgcttgttgttcttcgagcgtcgcatcattattattaaatatcgtattatgttgcgtttccgcacttttatcgatggcattttttgcatctgtttttacttttgtagctggtgtaattgcttgtattccttgaatcgcatttgtctttacttgttcaacatcagcattggtattagcgtttaaaatgtttgtgtttgctgcagttacagcagcattcactttgtcaattgctgcttgtctttcttcttgagtcgcatcaggattagcattgatctctgcgatatgttgttgtgcatcatgtgatacggcatcccttgcagcttgcttaacaacagttacaggagcaattggattaatggcatttagaccatctcctttggcgttatcaacatcagcatttgttgttgcttgattgatttgttctaaagcatggttggttgcttgagttaattcgttcaatgctgcatttttctcttcctgagttgcttctctattactatttatttgttgtcttttcgttgctgttgcttggttaattgcatctcttgcagcttttttatgagttacttgaggaacaactgctccaatagtattgatgccattatttttagctgtttcaacgtcagcatttgtagtagcattcgtaacattatcaatagcatctgtttcatccgtagctaattgatttagtgcatcttgaatctcgtcttcagtaacatctggtgttgcattgataatttccctttgtttcgttgctttatcacgtattgcttttttagcatttggtttaacaaccggtgttgcagtatccccacttaaggtctgtataccttgatctttgattctagtaacgccatcatcagtcgtttggtcaccaatattaccaattatttcatttttatgttcctcgataacttgtattgctgcttgtttttcttcatctgtcaattcatcattttgattaactaaatcttccatttggtcaacttttttattaactgcattttcagcatcaacacttcgaattaacgtatgttgcatttgattagttaatgaatcaatatatgcttgagaaactcttttatttaatggtacattgttacgattttcatctaaaatcgtttgtgcgcgtcgtttcagaccattaaagatatctaatgacgcaaatgtataatcagcttgttgaatacgtctgtcaacttcggcttgtaatgcatctttattcatgatgatatcgatagtatatggatttgtacttacagtatgactttctgcagctgaattaatgaaatcttgtgtatatgttttatacgttaatgtctcgttaaatgttactgttcttggtgtcggcacattatttacacgtaatttatatcttaaatcgagtattttatcaggcataagtcgtgccggagagtttgctgtacctcctccagtacttttaattgttatcacacgatttgctgcatcatatgtaacattcatatcattaacatcaacgcctgaattgttacttggaaaatctttagtcaatgaattgttcacatattcaacaccttcaggtaattgaacttgatatacaaagtcatttgtatctagagaagcaccagaattaccattattctttaatgatgttgttacagtaaactctttattatttgttgctgttggatccattgttcgtctttcaacaaaaacatgtgacccagaatgaagtccgatagagtcaacaaagctatagtatttgtaaccatcttttagttgataaatgccacgcgcatctgttattgcgtcatttttaggtacaaattgaattttgagatttctcacattatcaggtactttaaataaacgcaaagttggaccgccttcaacagtcttttcagcaatcgtatcattagtatcagcatttttgataataacatttgttgcgccttgaccgtttttagtagtcattgtattaaattcaaagattaattcagaattcggatttactgttaatgctttctcgataccattaaaatcgccatggtcattcgtatcagttccatgtatacgacctaatgcaattacatttccttgtgcttgatagttcttattatctcctgaatcaaacatgctcgttcttaccattgcatgactaaacacccctactttgccaccattgattagtgtgaagcccggcaagttattaacaacgtttactgttggcacagaacggttggtacttggtctaataccattgtcatcaaatgacagcacttcgttaggtgcattttgtcctgcattattggcattaggatcagttgttggcgtatatggcgctgtaattgcaactggtgcaccaccgtttcctaccgctgcagccgctggatctgctggagttgcattaggatctgccggtgccgcacgtctacttctctttttcggtctattagatgctggttcagcaattgcaactagctctggtttatttgaagaatgacgaacatcttcttgaatttcctttaaagttagatgtcctcctgaaccattttcatttgttttagttggtacatttaatgcggtattattcgacactacatcattattattagcgtttgacactgtctcagttgctgttgtattgccatctgtatgattattgttttgtgctgaaggcgtacttgattgcactgatgttggcgtagcttgatttactatactgccattattatgattaaccaatgcttgattcgttgcttgattggttgttgcagattgattaggtgtattctgcgcactatttgctaaacctctattattagcaacatctttatcttgtgaatttacaggtgttgcttgattagtatcgctttgtacattattatccgtagttaaggcttgtgcaccatttgggtttgaaagtaataaaactgttccgattaaagtagagaatatgcctactttatacttcctaatactatatttatttttctttaacaaattcatttcattttcctcctggttgtctgttctctgctgtgttgttaagaattatgctaaaaatatacgctccctcatattatatttatagctatattattttgtacaatattttaagttcactcaattttatcatcatcattttataaaataaagttttattttattacaatttagtttccgttttgtaattaaaatcttaataaaacataacaagaacgctttagattgttttgtaacagaaagtaattcataccaaaaaacaccaagcaaccgaaacgttacttggtgtcattacaaatgtaatattattttaaattatgtcactactttaaatactttttatttccaaaccttcatcgccccatgcgtgcatgccgccttcgacatttacggcatcaatgccatttgcctctaaatattctacaactttagcgcttcgaactccaccagcacatacaatataatatatttcatttttattaaatgaatttaaattatccggaatggtatccattggaattaactttgcattaggaatatatcccattgctgtttcttcatcagtacgaacatcaacaatttgaactggtttagattctaaaagtttattttttaattcatctgtagtaattgacttcatttcaaagtcctccttaaaacattatttagctacaatattgactaatttttgaggaacagcgatgactttcatgatgtctttaccttcaatactcgctttaacattgtcattagataaggcaatttcttgcatttcttcttttgatgtatctttagcaattttaattttagctctcaatttaccattcacttgaacaacgatttctacttcatcatctacaagtagtgcttcgtcataagttggccaaggttggtacgtaatagactcttcatgtcctaattttgaccataattcttcaccgatatgtggtgcaataggtgctaacattttaacgaagccttcaatgtaaggtttataaacttcatcaactttataacactcattaataaataccattaattgactaatagcagtattaaatcctaatgtttcaaagtcttctgttacctttttaacagtttggttataaactttatctaaagatttattatttgtagttacaatttttgaactcaatgtcccatcttcatttaccattaaacgccatacgcgatctaagaatcgacgagacccatctaatcctttttcactccatgcaattgcagcatctaaaggtcccataaacatttcgtaaagacgcaaagtatctgcaccatgagactgtactatatcatcaggattgattacatttcctttagatttactcatcttctcattaccttctcctaaaatcataccttggttaaataatttttggaaaggttctttagtaggtacgatagccaaatcataaaggactttatgccaaaatcttgcatataataagtgaagaaccgcatgttctactccaccgatatataaatcaacaggtaaccaatgttttaatttttcaggatctgctaacatattttcatttttaggatcgatgtaacgtaaataataccaacaactacctgcccattgtggcattgtatttgtttcacgacgtcctttcatacctgttttttcatctacaacatttacaaatgaatcaatattagctagtggagactcaccagtccctgatggcttgatttcatctgtttcaggtaacaacaatggtagctcttcttcaggaacagttgtcattgttccatcttcccaatgaatgacaggaattggttcgccccaataacgctgacgactgaataaccaatctcttaatttgtaattaactttcttttcgccagcacctttttgctctaataattgaatagctttagtaattgccgcttcattttctaaaccatcaagttcaccagaattaatatgtttaccttcaccagtgtatgctgcttcttcaacatttccaccttcgatgacttcaatgattggcaaatcaaactttttagcaaattcataatctctgtcatcatgcgctggtactgccataattgctccagtaccatatgttgataatacataatcagcaatccaaatttgtactttttcaccagataaaggattagttgcatatgcaccagtaaatacacctgatttatcttttgctaaatctgtacgttctaaatctgactttttagaagcttctgtttgataagcttttactttttctttatattcatctgttgtaattgaattaactaatgcatgttcaggacttaagactaagaatgatgcaccatagattgtatctggtctagtcgtaaatacttctacttttccttccgtattatctacatcaaatgaaactttggccccttcagaacgtccaatccaattgcgctgcatatcttttaaagactcaggccaatctaaatcatctaaatctgctaataattgatctgcatattctgtgattttaagtacccattgtttcatcggcttacgataaactggatgtccaccacgttcagagacaccatcaatcacttcttcgttagataaaacagtgcctaatgctggacaccagttaactgcaacttcatcaacgtatgctaaacctttgttatataactgtatgaaaatccactgtgtccatttatagtattctggatctgttgtattaacttcacgatcccaatcataactgaaccctaattctttaatttgtcgtttaaaagtttggatatttttctttgtaaattcacgtgggtcgttgccagtgtctaaagcatattgctctgctggtaatccgaatgcatcccaccccatcggatgtaatacattatatccttgcattcttttatatcttgaaatgatatctgttgctgtatagccctcaggatgtccaacatgtaaaccagcacctgatggatatggaaacatgtctaaagcataaaatttcttttgacctaagttatcatttgttttaaatgttttattttcgtcccaatagtcttgccatttcttttcaatttgattgtggttgtaattcaacacatttcctcctattcaataaaaaagacacctctaactattctatttacatagggacgacatttgccgcgttaccaccctatttcacaaaaattgtgcactcattttaatagtaagagatgtcattcattcaatttaaaattaatacgatttacatttagtccttaacactagctctcagcatcactagctttctgtagaaaagctccaaacgaaattaaattatacaaattaatattatgttataacgacatttatttcaagtctataacgttaattctatttactcattatgcatctatttttttaggttgcgtattattctccttgaaaaccattaataatattaatgcaaatacaagtagtagcatcataccgataaacatcatgcgcatattaaacgcatcaactaatacaccaccaagaaatggaccaaatgcttttcctactgtagcagctgaattcacaaaaccttggtactgtccttgcttaccatctggcgctaactgattggctatagttggaactgctggccatacaaacatttctccaaaagttaaaataatcataccgacaacaaatattgtaaagttttcggcaaaactcgtgacaaagaacgacaacataaaaatgatgatgccgacaaacatttgcttctttaagtttccttttaacagatagagaatcggtttaattaatggttgtgctactaaaatcattattccgttaattgtccataaaacactatattgtgccattgaaatattaatagattgtgtaaatgaagcgattgtagactcccattgaatatatgcaacccaacaaattgcaaacattgcacaaattagtactaatgaaataaatcttgctttattctttttaccagtaatatctaaatgagttggatatttaactttcgcattaatttcaatattaaattgcgttaccgcgacaagcgcaaacacaacatacataataagattggctaaaaagatatagttaaagctaaattctgcgacaaagccgcccattgcagcaccgacagccacaccaatattttgcgctaagtatatcgcattaaacgtttgtcttccgccatttggccacactgctccagccatagcgtatatcgcaggaataatcattccgccaccaaaccctaacattacaagccatacagcataccaaggccacccgtgaaagaaattaagtagcgttgtactacaaagacaagtgaaagttccaattaaaatcgtcttgtatccacctaatttatcaaatagtgaaccacctaataagtttccaataaccatgccaaatgaatttatcattagcactaaaccagcaacagttaaactttttccaagttcttgtttcatataaattgtatttaaaggccacaaaaaactggaaccagtaatatttaacgccatgccaattactagccaccagactgatttaggtatattcatatttcatagttcctctctcttttttgtcaaactataataaacactataacattaaaatatgttaaaatctgtacttagaactctttttttatagaaaggaaaatgacatatgggcaatcatttccaatacgcttttgaaaacaaacgttatcacacatggaattaccatttaaaaaataaatttggataaaaaatatttaaagttgcattggatggcgggtttgactgtcctaaccgcgatggcactgtagcacatggtggatgtacattttgttctgctgcaggtagcggagactttgcaggtaatcgtgcagattcaatcgcagtacaatttaaagaaattaaagaaaagatgcatgagaaatggcacgaaggaaaatatattgcttattttcaggcatttacaaatacacatgcaccggttgaagtattaaaagaaaaattcgaacctgtacttaaagaaccgggtgttgtgggattatctattggtacgcgtcctgactgtctaccagacgatgttgtcgaatatttagcagatttgaatcaacgaacatacttatgggttgaattaggactacaaacaatccatcagtcaacatctgatttaatcaatcgtgcccatgatatgaaaacttattatgatggtgtggcaaaattacgtaagcataatatcaatgtatgtacacacatcattaatggcttacctggcgaagactatgacatgatgatggctactgccaaagaagttgcacaaatggatgtacaaggtattaaaattcatttacttcatttgttaaaaggtacaccgatggtaaaacaatacgataaaggtttattaacttttatgactcaagaagagtacacaaacctagttgtggaccaattagaagtgattccccctgaaatgatcgttcaccgaattaccggtgatggtccaatagatatcatggtaggtccaatgtggagtgttaataaatgggaagtattaaatggcatcgatgctgaattagcacgtagaaattcttatcaaggcttgcgttacaagtctaaggtgaagcaatgaaattagaacgtatactccctttttcaaaaacacttattaaacaacatataacaccagaaagtattgttgtagacgcaacttgcggtaacggcaatgacactttatttttagccgaacaagtaccagaaggacatgtttatggtttcgacattcaagatttagctttggaaaatacacgtgataaagttaaggatttcaatcatgtttctttaataaaagatggacatgaaaatattgaacatcatataaatgatgcacataaaggtcatattgatgcagccatctttaacctaggttatttgcctaaaggtgataaatctatcgtgacaaagcctgacacgacaatccaagctattaattcattgctatcattaatgtcaattgaaggtattattgtacttgttatatatcatggtcatagcgaaggacaaattgagaagcatgcattgcttgattacttgagtactttggatcaaaagcatgcgcaagttttgcaatatcaatttttaaaccaacgtaatcatgctccattcatttgtgccatagaaaaaatttcttaagcatttgctgcgctatactatttataatttaggattgagtagtcaacatttgaaaaattaatgccaacaacaaaaagaggttttcaacttaatgaaaacctctttttatgctattaaacttacacagcaataattgcgtttaaactattttgcattgctgttgctctacttgcaatcgcatcactgatgaaattcaacaactctactttctcttgttgtaacttttcattgaaatgaataataactgttctttcatcgtcaacaggacgctctttgtaaatccattctaattcaactaaattattatacgttctcgtacgcttatacggtttaacttcaacaaatctgtccatttctttaagcgtcatagaacctttttgccataaagttagtaaaattaaaatttcttctctagacattttgtattcgctttcaatctcgctgaaaattgagttaatgtcacccaaaagtgtttctaattgcaaaattccaaatacagtgtcgttatttacttttttcatgctaaacatctcccaattaataatcacatatttagctactatacaagtattaacaaacatcccaacaatcccaaaacttgtatgtgctaacttatgcataaaactacaagtgtaaataaacttgctttctattcaattgtcaaagttgaataaaattaaataagtataaaaaccaataatcaatagagttaatatttagaaataagataatagtacataaaacaaatcactctattacatattaattttataatttatatacaaagaaaatatatcaatattaccattaaattgcaacaattctacatatatttcttcaaaaaagatacgcattgaatttttattacatataactctcatgaaaattgattaaactaaattaattagttagccttaaatttaacaaattaaatcaaaccgaatgaggctaaattggttatttttcaagatatgatttgtataaatcaaaacatttcttacaaatcaaatgtgtataaaatgtgatatacattttcaaccttaaaaaagttctaaaaaaagataagcatctactgtctcatctttcagttcttttttacgggtctgttttctaatttgagcacaatcttcgatttctttatctaaatgactaccaattaaatctatttcttctattgttaaatcgctatctccatcttcttttatctctggtattattttttcttcaactaagtcacgatatagtgtttttgaattctcgttcaatttcgattcgtgattttgaatactttcttccgcaccaatgtatatctattggcactagcttctacttttgtaccatcaataaaaattgaattatcatcaataagattttgctttaaacattgactatagaactgaataaataaagattcaattaacgcatcagtattaggattcactctaaaacgattaatagttttataagaaagtgtttgatcttgggctaaccacatcattcgaatactgtcatgaagtaatttctctattctacgaccagaaaatacagattgagtatatgcatataagatgatttttaacatcatttttggatgataggatgttgcaccacgatgatgtctgaattcatcgaattcgctatcaggtatcgtttcaacaatttcattaacatatcgcgaaatatcattttgaggaattctaacgaagtttctattggtagtgtaagttggggtcatgttataatttttatacataaggcacctctttaatttagtttagtagtatttattaaattatacgaagggacccaacacagaaaattcattttattgaattttacatttatgtgcaagttgggaaaaatgtcttattttttcaaagtatttaaaagtaaaattacatgttaatacgtagtattaatggcgagactcctgagggagcagtgccagtcgaagaccgaggctgagacggcaccctaggaaagcgaagccattcaatacgaagtattgtataaatagagaacagcagtaagatattttctaattgaaaattatcttactgctgttttttagggatttatgtcccaacctttttagaatattaaatttctacaatttcgtcatcttcaacaataaagcccattgtattgacgctgttatttaagaaagtcagaatataacgcattacttcatcacgttctggctcattgtgaacctcgtggtaaaaaccttgccaagctttaaaatataattcaggtgtttgatatttttctttaaactcatcaattgccctagtatcaacaattaaatccttcgttccatacattaatagcgttggcattggttgaatgtcatgaatatgagccatcgtatctttcatcgtctcattaattgtattataccaatgatacgttgctttttttaacattaaaccatcgttaactgtttcttcaacaatttctaaattacgtgttaaatcttttggttctacaccaacattaaaacgtgtgtcttttgaaattttacctatatttgaaacaagtttatctttacgattttttccattcttttgaagttctagcataggagaaattaacatcatcccctcgattggcaattctactttttcaagtaaatttaataaaatcaaaccgccaagtcctacccctaatacataagtaggaattttatattcattagctatctttaaccagtctagcaaactttcgtgatacgtttgaaagttttcaatttgtcctttattagctcttgaagtttgaccttgaccaggcaaatctcccataatcacatgatagccatttcttcttaacatcgtaataacatatgcatatcttcccgtatgttctaatatattatgagcaataacaacgacgcctttcgcatcattttcagcttcccacttccacattattatactgcccctttttcattaatcttcaataacataattatagcaaattcactatgtagatttctatttatagtattattgttgtccatattattatatataaatgaaatcaacatcaataatagtgtaattatacataattatttttgattgtttttgatgaaaacgctttctcgaatatttttttcatgctaaacttattgtaaacacaagggtttggaggagtagcaatggcactattaaagaatttttttatcggattatctaataatagttttttaaacaacgcagcaaaaaaagtgggcccacgtttgggcgccaataaagtcgttgccggaaatacaattccagagttaattaatacaatcgaatacttaaatgacaagaatatcgctgttacggtagacaatttaggggaatttgtcggtacagttgaagaaagtaatcatgctaaagaacaaattttaacaattatggacgcgcttcatcaacatggcgtaaaggcacatatgtctgttaaattgagtcagttaggtgcagaattcgacttagaattagcttaccaaaatttaagagagattttacttaaagcaaatacttacaacaatatgcatataaatattgatactgaaaaatatgctagcctgcaacaaattgttcaagttttagatcgcttaaaaggcgaatttagaaatgttggtactgtaattcaagcatatttatacgatagccacgaattagttgataagtaccaagatttacgattacgtttggttaaaggtgcatataaagaaaacgaatcaattgcatttcaatctaaggaagacgtagatgcaaattacatcaaaataattgaacaacgtttgttaaacgcacgcaatttcacttcaattgcaacacatgaccatcgcatcattaatcatgtaaaacaatttatgaaagaaaatcacattgaaaaagatcgtatggaattccaaatgctctatggttttagatcagagttagcagaagaaatcgcaaatgaaggctataatttcactatttatgtaccttatggcgatgattggtttgcgtattttatgagaagattagcagaacgcccacaaaacctatctcttgctgtaaaagaatttgtgaaacctgctggcttaaaacgtgttggcataattgcagctttaggagctacagttatgttaggtttaagtacaattaaaaaattatgccgtaaatagagcaagacataaacaataatttaggagtctggaacaataatcaatgttctaggctcctaaatgttatattggcagttctgaaacatttataaatctttgattatgaactcacaacagtgctctatgcttttatagattttaataaattagccatttcaattgcacttactgctgcttcagcacctttattgccagctttcgtacctgctctttccacagcttgttcaatactttcagtcgttaaaataccaaatatgactggtacattagtttgatcattcactttagaaacacctttcgcgacttcattacaaacataatcataatgagacgtagcaccgcgaattacgcatcctaatgtaattactgcatcataatttcctgatgaggctaattttttagctactaaaggaatttcaaacgcacctggcacaaatgctacatcaatattgtcttcattaacatcatgtcgaatcaaagtatcttttgcaccttcaagtaatcttccagtgataaaatcattaaatcgactaactacgattgcaactttcaaatcttttccaattaatttaccttcaaaattcatgttaaaatcctcctatattaaatgacccatttttatttttttcgtttccatataatcatgattatgtaccgtttctggtacgataacttcaattctttctgcaatatcaatgccatatagttttaatccctcaaatttacttggattattacttaataaattgatatgttcgatgttaaaatattttaaaatctgtgcagcaatatgataatctcgcaaatcttcatcaaaacctaatgctaaatttgcagttactgtatcatatccttgctcaattaattcatatgcgcgtaatttgtttaacaatcctatgccacgaccttcttgaggtagataaataatcatgccaccatgttcattgatatacttcatagacgattcaagttgagcaccacaatcacaacgttgactatggaaaatatcgcctgtaaggcacgcagaatgtaagcgtacattttcatgttgtcgaattgcaccttttgtcagtacaactatctcttcatctgtgtatgtcgctttaaaaccatacatatcaaatgttccgaaatctgtaggcattttcacttttgccttaaattcaatttctggttctaattttttacgatattcaattaaatcatcaatcgtaatcatctttaattgatgtttttctttaaacttttgtaaatcttgtcctttcgccatcgtgccgtcatcattcataatctcacaaatgacaccagcgggcttggcaccagtaagtttagctaaatcaacagccgcttctgtgtgtccatttctagctaatacgcctttatcttgtgctactaatggaaataaatgaccaggacgattaaaatctttagcttcactactaggatcaatgagatttttggcagtcaatgtacgttcataagcactaattcctgttgttgtatctacatgatcaatactcactgtaaattgcgtaccaaagatgtcggagttatcatcaaccatttgtaccaaatccaaacgttgtgcaatatctttagacactggtgcgcatattaatccccttgcttctttcgccataaaattaatggtattatcgttcatccattcagtaaccgctactaaatcaccttcattttcacgattctcatcatctactacaataattggttctccattttttaaagccattaaagcactgtcaatattatcgaattgcatgctacccctcctaaaaaccaaatgctcttaatttatctacagataattggtctttatctttatttaaaatattttcaacatatttaaacaaaacgtctgtttctaaatgtactttatctcctaattttttggatgataaaatcgttgaacgcctcgtttctggaataagatgaatgtcaaaactgttatcatgcttatcaaataccgttagactaacaccatccacagtaatagacccttgcttaactaactgattattaatatgttggctacattgaatcgtaataatttttgcattggctgtttcatttatttttgaaactgttcctagttcatctacatgaccgaggacaaaatgtccaccaaacctaccgttaccactcatggcacgctctaaatttacttctgattgtcgcttaacatctgctaaataggttttattttcagtgcctttaattacttgaacagtaaaagatgtctgattaaaatcaatcactgttaaacatgcaccattaacactgatggaatcaccaatatgcatatctgccgtaatcttatgtgcttcaatttcaatcgtcctgactgattgacgaatttgaacacttttaacgacacctatttcttcaacgatgccagtaaacatgcatcatcacttctttcgtaaagttaatttaacattttgatttaataactcggaatgaacaatttcaaattggttcgcatctggtatctcaatcacatcatttgtttgataaaattgataatttccagatccgccaattaatttcggggcataatagagaataaattcatctatataattagattggagaaattctgaagtagtggttggacctgcctcgactagcaaagttccaactcctcttttatataaattgtgaagaattgttgttaaatcgcaagacttcaagtaaataatttcaatatgtgtttgattggttgttaaatttggattttcagtatatatccaaattggtgttgattcatcttgataaatttgctgattaaaatgaatattcccagacttagacaatattacttttatagggttttttccatcttgaatacgtgtagtatattgtggatcatctaattcaactgtacgtcttccagttaacactgcgtcgtgtcgatgtcttaacttatagacatcttgtttaacctctttgttagtaatccattgactttgtccattatcattcgcttgtttaccatctaaacttgcagatactttcactgtaatttgtggcagttgctttgcttttgctttaaaaaagtcttggtataattgtgatgcccgttcatcatcaacgcattcaacctcaataccgtgagcccgtaacgtctcatcaccatgtgtgtctaacgaattgtcttttgttgcgtatactacttttgctatcttacaatcaattattttgttaacacagggtggtgttgaaccaaaatgactacatggctctaacgtaatataaatcgtcgcaccttcagcattttgttgtgccatatcaagtgcttgaacctccgcatgcttgtcaccttttctcaagtgtgcaccaataccaacaatcctaccttctttaactacaacagcgccaacgggtggattaacacctgtttgaccttgtaccatatttgcaagttgaatcgcataatccataaattgactcaaatgatcacctctataaacaaaaatcctcacatcatgaattaagatgcaaggagaaaaatttatcgttaaataagcctatttgtacacatttttacaaatacgctacattatctttgtcgataattaacattctttctcccatccagactttaactgtcggctctagaatctcactagatcagccactaatatgaaacatattagcaggtcgcaggctttatttactgccggttgggaatttcaccctgccccgaaagaattatatatgaaattgttatagattatttgagtacgtagtatgtcaactacatttaaaatgatactatatgttttctgaaaaaacaattaatgacggttttaatttaatataatctgagtactataggcatctcattgatatgattcttactaacagacattaaaatcaaaccttcaattcgtctctatagagcgttctctttattatcttctagttacaaattattgattgtcactgcgctgttgttgctcattcgattctaaagcatcatataattgagatactgtatgcgcaacttgttctacaatcattttcacaccgtttcgtagtttattaacaccgtttgtcatttgacctatcgcaatcatatttgttaatgttccaaaccttggactaataacttgattggtttccggaatgatttgtatgcctcccattgggtgtgcttgtacaatttgtctattttcaagatttctaattaatcgatcatcttgatccaattcatttaaatgactttttgcacctgtcgcgttaatgacaacattatatatgtctactgattcttggtttttgtatgaaaaataatacaacttgccatcatgtttcacatcttctaaatcttttttcaaaattaaagacttattttctattaattcaataattagttcagctgttcttggaggcattggatttgaatttaattgaatcatctttgagtatttttgattaaattgatgttggtcttcaatacttaagctattccatatccaatttaaattctctttcaaatgttcaatcatactttggaaaatgcccatttctgttggacgcgctaaatcatacttcaaatctgcaatatgatttcctgtacgtctatgtactaattttttaaaatcaatgtcataatcagcacattcttttaaaaataaagaaactaaagtatcaagcggtgcattgccgaaatgatgttttttaatgtcatttaatttgtctttagttaagtacttgaatgtcacgtctatcattgtacctcttacacttggtaaatgagcagaacgactcgtcatagtaattggtaattttggatgatgagcagcaacataacggacaacatctaaactggcaaggcctgtaccaataatcgcaatatcgtccagttcatttacttcgtctaacgtattatatgttggataaggcgtagcgatatatccttttttaccctttaagttatatggatcatggtaggcaaatgtaccacatgttaaaaatacataatcgtacgcttgccatgattgtcctgaatttgtagtacatatgtaataagttaaattcgtttcatcgatattagaatttgtataaatctcttgaactttattataattagttgatatatttggatattttttcgtgaacatagataaataagatttcatataatgtccgaatacaaatctcggtaaatatgcaggttcatcaaaattaaaatcagtttgttgtttataccacttccaaaattcagtctcatcatctaaatttaaactcatctttttcgaaggcatattaattagcagctcagaactatcattttgaaatggtacgccctgtcccatatttactttatcatcgtataaatctatatctaattgattaaacttcgggtgcttaactaactctctcaatacacttacaccagcagttcccatgcctattattgctacacgcatatatcatccatccttttgtaattcaaaatattatatttaaactattacctataattatagcaatttggtatttccaataaaatttattaaggtaagctattatttcactttcacaaccattaaaccatttaaaacttttcatttaatatcaaccttagtgtttgtgttaaaatatttttaacgaggtgaattaaattgaaatttatagcaaagatattaatctcattagtaattctatttatgatttttagtcgtaaaaacaaagcttcttaatcaatacccttgattacaaaataaattcaactaaggtgattggccatacactcaagatatggctaatcacctttttcaatgcagaacaaagagtatattttgcaaaatcaatatctataatttatctttaatacccttttaatactaaaaccaaatttaaattacatagtcatatcgtgtaatataccaaaggaacatagacattcatctatatagatgataatctatttaacgtctaggaggtatgttatgacgtataaagaactagcaacatttttaaaagttttatcagattcaagcagattagaaatactagatttactttcttgtggagagttatgcgcttgtgatttgttagcacattttcaattctctcaacctacacttagctatcatatgaaagcattagtaaaaaccaacttagttacgacacgaaaaatcggaaataaacatttataccagctcaatcataatatttttgagtccgtaattaataacttgtctaaggttcatacctctaaccaacgatgtatttgtcataaccttaagactggtgaatgctaatgatgacaactttagcgacactcatttttctagtaactttattatttgtattatggcaacctaaaggcctagatattggcattaccgcactaactggtgcctttattgctgttattactggtgttgtaagtttttccgatgttttcgaagtaacaggtattgtttggaatgctactttgacttttgtctcagtcattcttatttcattaatattagataaagttggattattcgaatggtcagctattcacatgcttcatgcttcaaaaggcaatggtttaaaaatgttcgtttatatcatattattgggtgccattgttgctgcatttttcgcaaatgatggcgcagcgttaatcttaacgcctattgtattagcgatggttaaaaatataggttttagtaagcgggccatattcccttttattattgcgagtggttttatagctgacacaacttctttacctttaatcgtgagcaatctagtgaatattatatctgctgattattttcatgtaggattcgttcgatattttagtagaatgattatacctaatttattctcgcttttagcaagtattatagtattgtggttatattttagaaaagcgatacctaaaacgtttgatgataataatataaagcatcctaaagatgccattaatgatttaaagctatttaaaatttcatggattgttctagttatattacttttcggctatctaatcagtgaatttactaaaattccggtatcaattttcactggaatcattgcttttatttttctaatgttggctcgtaaatcaaatgctgtaaatattaagcaagtcattaagggcgcaccttggaatatagtattattttcaattggtatgtatatcgtcgtattcggcttaagaaatgctggcattactttaatattggctaaaatattagaatatatttccaattacggtctatttagcactattttgggaatgggcttcatttcagcgtttttatcatcaataatgaataatatgcctacagttttaatagatgcgattgctattggtcaatcaaatgtccatggcatgttaaaagaaggcctaatttatgcgaatgttatcggttctgatttaggtccaaaaattacaccgataggctctttagctacattactgtggttacacgtcttaacacaaaaagatgttaagatttcttggggcacatactttaaaactggtatcatcattacaattccagtactatttataaccctcatagggttgtatctaacacttatcatattttaattaattaggagattgttatgactaaaaaaacaatttattttatatgtacaggcaactcatgtcgaagtcaaatggctgaaggttgggctaaacaaatcttagcggatgattggaatgtatattctgctggtatcgaaacacacggtgttaatcccaaagcgatagaagctatgaaagaagtaggcattgatatatcaaatcatacatcagatttaatcgataataatattattaaaaattcaaatttagttgttacattatgtagtgatgcagacgtaaattgcccttctttaccaacaaatgttaagaaagaacattggggatttgatgatcctgcaggcaagccttggtcagagttccaacgtgtaagagatgaaattaaaatcgcaattgaaaatttcaaatcacgatgagagtgggacagaaatgataaaaaaacactaatgatttattatgtagtggttctttatcattagctataactaatgtgtacttaaaaataggaatacatgagtaaaactcatgcataagaaatactaatttctaaagaaaaagtaattctttatcgatgtcctgccccacttgcattggtgggattatcaatcaatgtgttttctctaatgcaaaaagacgctttctatcaaaacaagatagaaagcgtctttttagtatgtccgagtcataaaaacaactcgtagcttatcaaattacttattcaaatgtttactgtcatctttatacacaaagtatttgaagtattttccttcagtcttcatgttcttataaaagtcagcgataattgttgcattactttctgcccacttaatatctgtagcatattgatgttctcctggattttttggattccatctcatactatacaatgtattttgatctgtgcttgataagaagtgcttatgaatgaaatcagcaccgcctgaaatagctttttcaggtgtatcccaaccatgctttttagcatattctgcacctgttttaattgggtctttatcaagggctcctactccatagaaattgtagtactttttgccatcaatttcgactccattagctaattcacttttaactgcgccagtttctaataatgcatgtgaaattaaataaacttcgttaacgtgcttatctttagcagcttttaagaaatcatccgtatgtttcaataacgttggtctatctactaacatacgtttaattctatttttatcaatcccttgatactttgataaatctaaaaattgatatttttgcttttcattatcgataaaagtaccgctatccattgcacttttaatttcagttgcagatgcatctctccatgcatcattctttttatttgatacctgttgactcgtataattatttatttgtttctttgctgcatcgtttaatgtaacatttaacttttcaatcttaatgtcggatttaacatgtttgaaaaatatctgatcggatatcattgagaaaaataaaaatgagacaacagcaaatatgacaacaagtcctattattccaaaaatagaacctttcttgtgtttattcatatccacacctcttaggtcattgttgttatacattcagtttgactacgataataaagtttaacattattaaaaccgtttaacaattttatctatgcattgttacatattcataaataaacagtaatgtaaatgaaacgttttaaaccatttatcaacattactttacgttgatctacgaatcataaatgttttatctttttgtataacctttgaaaacctttatatcaataatcttattattcacgtattaaaaaacaaaaaattcttttgttcgtttacttagtttcttttttataatccatcataataaaacttgctgcatttgatctatttttataatagtactgatttaaatcaatcgtgccttcaatttgaccatcacgatacatcatttcattagtgaagttatttatcatcacgaaatcagcgcgatctcttataacatctaaatcgtcgtttcgtgcaaaaaaatgttctaaatttaaatgtgcgtaatccattgttacctcccgattacaaattttgttctatctactatttagcaaagtaataatacatcatatcacattaaattaattacttatgtcttatatttaacacttaatttagcgattacgcaaatgaatgatttttctaaatattttattctaactttatccggaaatatttgttatacgtataacttggagaatgactacttgaaatttaatgacgtatacaacaaacaccacaaaatcatacaccatcttttaaaaaaatataatattagctataattatgatgagtattatcaactactcttgataaaaatgtggcaattgagtcagatatataaaccctcaagcaagcaatctttatcctcttttttattcactcgattaaatttttaccttatcgatttattcagacaacaaaatcaattaaaagatgtcattttatgtgagaataattcaccaacattaactgaacaaccaacatactttaatgaacatgaccttcgtttacaagatatcttcaagcttttaaatcaaagagaaagactatggctcaaactataccttgaaggatacaagcaatttgaaattgctgaaatcatgtcattatcgctttcaacgattaaattaattaagatgtccgttaagcgtaaatgccaacataattttaattagtttattgtgaaatttcggtcgatgtgttaatgatgttgaaacaccctaacatcttcatataaatttattttaaccattaaattaacaacttattaaacgaggagtactatatttgcaagacaattctactaaatatctactttatatccaaactgctacttcaaaccatctcgaaacaaattgtgtctttttacattgcgattacattcttaaagttccaattaacaaactcgtttcatattatgcgaaattgcatttatcatcacaaagtgtgctaattgagactgcaaaaaacatactaaatattaataaactggttcctatttacatcaacccaaaaactatactttttccgttaaaacataaacgtgcaccgatacaaatttatatcaatgcacattatattgttggtatgactgccatagagaattcaacattaatacattttcaagaaggcattcagctagaagttgatgagccattttctctagtttcaaaaaaatgtcatgaaagtttagctttgaagcacttcattgaaaatactatttcgaattaaatttaatttctaaaagtttcttagtaaagtatgatgtcacaatttttataaaatatatgctagcaaacattaataaaatcgctccaataattgttaaaataacaacagttgtagataaatctaccttaggactaacgaaaaattgtacgccagatagacttgtaattagcccaaataaaaacaaacctaataaagcaacataagcaaacatcatcactactaatgtaacaaacatactataactttttgtttctttatttcgaaatacattttgtcttaagtaagcattagcaaaggtaacaggcttatttaagttaacgctgtcatcatcagatatagaagacaatcgttgatctaatgcttgtttctccttcttgttcaaaaaccataattgctttttaacttttttatcaaatgatgctttattcataattaaggatttctctcctttataatattgacgtaattttaaacattagcgtcaattgaaagtgtattttatatattttacagaaatatatgtatcaaatctacaaaaatccatattacaatttcatttatggtgatttgacgctaaaatacagtctgctaatttttcaaactaatgctttttaggtaggtacaatgataaattttaatcgtaaatatgtttcatatattatgaatctagccttaatcatattgcattcaaaataattttaaaaaatgaaaagaaaggatttagcatgcaaaaattcaaagactttttttacgatgatttatcggttacacgaggaaattattttttaactttaatggcagcattttttattactatcattttatttatcggcatagttgtcagtgaagtacatttactttatagcatgctaattgtattagtaggtttaattctattgaggctattcaaaatcaatttattctcttttaaaaaattaacattgtctcaagttatttatattataggcggtgcactattaatttatgggttagataatctttatttatattttcatgacgtaccggcaaatgaacaacaattagagcaagcaatacgaaatacaccattctatatttctattttcactgttaccatcatccccgctattgtggaagaaattgtttttcgcggtatgataataagggttatcttcagaaaacacttgtttttagggttaattgtgtctagtttagtttttgcatcattacacgaatctgacacttggattggttatttaccttacttatattctggtttgatttttggcctaatttatataaaaacaaaacgattagaagttgtaatattcatgcacttcttaaataacttgttagctctgctctttataatatggagataattttgagataacctttcatattattttcaaattatctatctgatatttattttattgaacttgagtcaccacttaaactcaaaaatatgtgtcatcaagtgcaaaataatttagaactaatacaaacataaaaacttttactttacgcttaaaatcaaaagtcacatacctagatataagtacaacttgtatattttgtactctaataggtatgtggcttaaataatatttaattcttgagttgcatatagtaactgtttttattcattttctaaaatatgcaagactaatttccttttctactcctgttgaatcaatttagacttttttataactcgagcttttacttagctgaattttgacttcttcttcattaataactatgatggaaaaacccccataagcacaatgcctatgagggtttaaatatatttatatattatagaatagaaagacctgaagattgaatatctttcgcaaagcctttaactgtatctactgataattcgttaatatcgcgacctaagtttgtattcacttttttcacaacatctgctgggcatgtaataatatctgcaccaatttcatcagcttgaatcacattgaataattcgcggcaacttgcccataataatttaacgccgtctttactatgcgtaacttttacagcctctttcattaatggtaatggatctacgcctgtatctgcaatacgtcctgcaaatactgaaacatatgttggcacaccttcagttactgcttcagttatttctttaacttgttcaattgtgtaaacagccgtaacgtttaatctcacattgtcagctgaaagttttttaattaaaggaatcgttgattcaccttttgtatttacaataggaattttaacaaatacattttcgccatattgttttaaaattgctgcttctttttccatagtttctaaatcgtctgcaaatacttcaaatgaaattgaagcatctggaatttctttcacagcttcttcagcaaaagctttgtaatctgttacgcccgctttagccattaaactaggatttgttgtaaaaccatccacttgtttgtttttataagctgctttcatttcttcaatatctgcaccgtccgcaaatacttctacatttagtttagccatataatatagcctccttgattcttattaaaattttaacaacatctgcatgtctttttcttacaaccatttgtaaaaaatgatttttatttctttgttatataaaacatttatatcacgcttttataatatatagctaattttttgcctatattttttaaaaatgactttagcaaacattgtgtctacaagttaataaaactattgttttatgattgtttatgatacgatatgtaaatgataatcatccaggaggtctagcatgtctcgttcaaaaaaatacttttacttatctagcttaatgattattttaagctttttctttaatacaaataacgttttcctaagtggactttttaattcttttattaaattaatacttttctgcagtgttattaactcaattgtactaattttgtctataatttttgcagatcgttcaattaaatcactaaagcctgatgcagattggattagaattgcgagtaaaagtttgccttggattattctaattgttattttagtacatatcttttcaattgttcgtacattcggttttatttaaaaaagttaatatgtcattgtagccttaatacaaaacaatacaatgtatcatgctataatgagtaaaacaatttgataacgttgttgcgtataaaaaatattagattttcgaaatcataactatgcatctaatcgctatagttatacaacaagatataacatataatgaggtttgataatgcatcgacaatttttgtcgtcgcgttgccaaaacctcttttttaaattcaaactacttcttttcgaggtgaaccaaatgcaatatgtatatatttttatcggtggtgctttaggcgctttattacgttacctcatttcttttctgaatactgacggaggttttccaatcggaacactgatagccaatttgactggtgcctttgtaatgggattgctaacagccttaacaattgcatttttttcaaaccatccgaccctaaaaaaagctattacgactggttttcttggtgctttaacgactttttcaacatttcaattagaattaatacatatgtttgatcatcaacaatttataactttactactatatgctgtaacaagttatgtctttggtattttgttatgttacgtcggtataaaactaggtggtggtttatcatgatatcaatcattttagtcatgattggcggcggttttggcgcaattgctagaagtgccattactgattattttaatcataaatttacttcaaagttacctatcgcaacattgatagtaaatctagttggtagttttttaattggattaactataggcttatcaatttcaatctcatggttccctgcgttctttgttaccggttttttaggtggcttaacaactttctcaacgttagccaaagaacttacactaatgatgacgccaaaatttaatattaacctttttctcaattattcacttttacaattcatcattggatttatagcttgttatattggctatcatatttaaaaataaaatgcttcattcagcaaataggtaaattacgacaccttcctgaacgaagcattttttaattttcatgcaaatttttaagcaccatataatgcctaccaaatttcaataatctttgttgccgtttaaataatgtgaatgtcaataaattctccaaactagtcgaaaataaagggagtgggacataaatccctaatcaaaaccacccgtgtgaacgggtggtttgttctgcggctataagccttccttactggccagccctaaaagggcactgacaagtcagccaactgcactactattccagcaaccctaaagggttactcttttttctttctttttttatttttctctccagtgaaaggatctaaatattcttccattgagatttggtctgcaacgatatcctcttgtaattgattacgaatataattttcaatcacttttttatttctacctactgtatccacataaaatcctttacaccaaaactttctatttccatatctatactttaagttagcatgtctatcaaatatcattaaactactttttccttttaaatagccaacaaatgatgataccccaagtttgggtggtatactaactaacatatggatatgatctttacatgcctctgcttcaattatctctacaccttttctttcacataattgacgcaatataatccctatatcttttttatttttccatatatcacttgtcttctgtatttaggtgcaaagacaatatgatacttacaattccattttgtatgtgctaaactgtttgtgtcagatgacattaaatagcatctcctcgtgttgattattttggttggctgaccaatatttattctagcacgtagagatgcattttttgtgacaatggtagaaccttttctgaaccatacgcatagcgtatggttttctttttacaaaaaaaagcagtaagataattttcaattagaaaatatcttactgctgttctctatttatacaatacttcgtattgaatggcttcgctttcctagggtgccgtctcagcctcggtcttcgactggcactgctccctcaggagtctcgccattaatactacgtattaacatgtaattttacttttacatactttaaaaaataagacactttgcccaacttacactaccaatagaaacctctgttagaattcctcaaaatgatatttcgcgatatgttaatgaaattgttgaaacgatacctgatagcgaattcgatgaattcagacatcatcgtggcgcaacatcctatcatccaaaaatgatgttaaaaatcatcttatatgcatatactcaatctgtattttctggtcgaagaatagagaaattacttcatgacagtattcgaatgatgtggttagctcaaaatcaaacaccttcttataaaactattaatcgttttagagtgaatcctaatactgatgcgttaattgaatctttatttattcagttccatagtcaatgtttaaagcaaaatcttattgataataattcaatttttattgatggtacaaaagtagaagctaatgccaatagatatacatttgtgtggaagaaaagtattcaaaatcacgaatcgaaattgaacgaaaattcaaaagcattatatcgtgacttagttgaagaaaaaataataccagagataaaagaagatggagatagcgatttaacaatagaagaaatagatttaattggtagtcatttagataaagaaatcgaagatttaaatcattctattgagaacgaagattgtgctcaaattagaaaacagacccgtaaaaaaagaactgagattaagaagttcaaaaagaaatttgatgattattccgaaagaaaaaataaatatgaagaacaaaaatcgattcttaaagatagaaatagtttttctaaaactgatcatgatgcaacttttatgagaatgaaggaagaccatatgaaaaatggccaacttaagccaggatacaatttacaaatagcgacaaattctcaatttgttttatcctatgacctatttcaaaacccgacagatactagaactttaattccatttttaacaatgattcaaaataccttcggttatttgtagctgatgcaggttatggtagtgagcaaaactatatggccattatagatgattttaataaaacgccacttattacgtatggcatgtttattaaagataaaactagaaagtttaaaagtgacattttcaacactcaaaattggaaatatgacgaacttaatgatgaatttatatgtcctaataacaaaagaataggttttaaaagatatgcataccgtaatgatagatatggttttaaacgagacttcaaactatatgaatgcgatgactgttcagcatgttctttgaggcaacaatgcatgaaaccaaattcaaaatccaataagaaaatcatgaagaattataattgggaatactttaaagtccaaattaatcaaaagctttctgaaccagaaacgaaaaaaatctatagtcaaagaaaaattgatgtagagcctgtttttggatttatgaaggctattttgggtttaactcgaacgtcagttcgaggaataaataaagttaaacgagagctaggttttgtattaatggcacttaatataaggaaaatagcagctcaacgagctgtacattataaaatacatatcaaaaaaagctgatttctatcaaataattaatagaaatcagcttttttacattgcctaagaacttaatgtcccaagccctgacaattcatctaaccttttcatcagttgagcgattttaatctagccttcaaatttttttggatcaggtccaattctcttatcttgatttaaaccatcaattcgcgtcatttgttcatctgataattcgaaatcaaatatttggaaattttcagagattctgtttggtgtcaccgatttagggattgtaaccacagcatgctgcacattccatcttaaaacaacttgggcaggtgactttcctaattcttgagcaatgtctttaattgtctcatcatttaaaatttgtgcattcatcaatggtgaccaagattccatcacgatacgttgtgctgccaaatataatttcaatttatgttgggttaaatatggatgatattcaacttgattaattacaggtttaattgacacttgtgccaacaaagcttccaaatgttcaggttcaaaattgctgacacctatatttttaacattattatttttatataaatcttccatacctttccatgtatcaaccattacggcttcgttcgtacctggccaatgtactagatacaaatctaagtattttaaacctaatctagataaactagcttcgtaagcagctgctacattttcacgaccgaaatcctcaaaatataattttgaagtaataaataagtcttctctagcaataccagttgactccaatccggcacgaatgccagcacctacttgttcttcattcccataaacttttgcggtatcaatactacgatatccttgttcaatggcatacttaacactttccatgcaattttcatcattttccacacgaaatgtccctaaaccaatttgtggcatcgtgtttccattataaaatgttttaacctccataaatatcgcctcacctttttgatgtattataccctgttatcataacaaatctgagttgaatacatgagaaaaaacacttagagcaatcaaccactaaaattctagtaatatctctcaaatattaatcaaattgtaaaagtaattctgtttaatttatgacaaactaaaaaagccgaagtaacaacatatagtcatcacttcagcctaacatttaattgaatgattcaattttatccatcatttgttgtaagtcttccacgttgtattgaatacgaccatggaatacaaatttgttaaagaactcgtctaattgttcagcaccgacaagcactttgacagcactattttgattataatttgaaatcgttacatcgccttcatttttaagattaaagtataaaattgaagttggtgtatatttggcacctaattctttttgtaagtcttcagccaattgtttaatcgcctcaatttgatctgaataatttacaaatgataatgaacgtttgtcatcattttgatccatcacaatagtttgcggtctagatttatctaaatccaatgtatcaaatacttgttccattggtggtaaatctttaaattgaccgccactaataccattataaacatgaccttttaacaattgagaatcaataatataaagaccagttcttgttaatactaaatgactaattcgttcaatattattaaagccatcctttggtaaaaagatatttgccataatgtgcatatcttctggtcgaattcgtttttctttaactaatctttcacgaataccaattaatctcatgtccgttacatattcactatgatttttcgagaacaattttaatgcgtcaatctcacgatcttttgtactaaccatgtgattataatcttcttgttgttttgtaattgtctttttattttgaatacgctctttctctaaagcttcttcatgagactttttaatgttttgttcttgttgttcatacttttcttctgtttgtcgcttaacttttttcttactacctaaggcaactaaaaaaaggacaaaaaagattaatgcaatgactactgcaataatgagtccaatgactatcggtgaagataaatccatcacaacaacgctcctttttaatatatgaataactttaattataatagaaaagctaaagattttcgatacatattatcatttatataccgaaaatcttttatttagctatattcaattcatcttattattttactgcgtcttttaattcttccactttgtctaatttttcccatgggaataagacatctgtacgtccaaaatgaccataagcagcagtttgtttgtaaatcggttgtttcaaatcaagcattttaataatacctgcaggtcttaggtcaaagtgttttctaactgcttcgacaagttgcccttcagaaactttacctgttccaaatgtatcaattgcaattgacactggttctgcaacaccaatcgcatatgccaattgtacttcacattgatctgctaaacctgctgcaacaatatttttagccacataacgtgcagcgtatgcagctgaacggtctacttttgtaggatccttaccactgaagcatccgccaccatgacgtgcatagccaccgtacgtatcaacaatgattttacgtcctgttaatcctgcatcaccttgaggtccaccgattacaaagcgtcctgtaggattgatgtagaatttagtttgttcattaatcaagttttctggaacagttggataaatgacatgtgctttaatgtcttcttgaatttgttcaagtgtcacatcctcagcatgttgtgttgatacgacaatcgtatcaatacgtactgggttatcattttcatcatattcaacagtgacctgaactttaccgtctggtcgtaaataatttaacgtaccatctttacgcacatctgataaacgttttgccaattgatgtgataaataaattgctagaggcatatacgtctctgtttcattcgttgcgtaaccaaacattaaaccttggtcacctgcacctgttgcttcaatttcttcttcgctatctttatcacgatactctaatgctttatccacgccttgtgcaatgtcaggtgattgttcatcaatcgcagttaaaattgccattgtttcataatcataaccatattttgctcttgtgtatccaatttctttaattgtttctctaacaactttcggaatatcaacatatgttgttgtagaaatttcgccggcgatcaatgccatacctgttgtaacagttgtttcacaagctacacgtgcatttggatcgtcttttaaaatagcatctaatattgcatctgacacttggtcagcgattttatctgggtgtccttctgtaacagactctgaagtaaataatcgtttgttatttaacatagtttgctcctttaaatttatattacgaaaattctctctctgtgagctaaataaaaaagaccttctaactattaatatagagagaaggcctaatacgtccattcgctcttatcgttcagacctatttgtctgcaaacggtttggcacctttcttttataaaaaagaggttgctgggtttcattgggtccatgtccctccaccactcaggataagagaatccgttaaaaataatagtacctaattaatgaattaatgtcaatttttcacaaataaatttacagtaaaatattgtagattaattatgttaatgtgttatactaattaaatgtaaaggcttacatttaaattatcgctttggagggatttaggatgtcagtagacacatacactgaaacaactaaaattgacaaattactgaaaaaaccaacgtcacattttcaactttcgacgacacaactttataataaaatcttagacaataacgaaggggtattaacagaacttggtgctgttaatgcaagtactggaaaatatactggtcgttcgcctaaagacaaattttttgtctctgaaccttcatatagagataacattgattggggagaaattaatcaacctatcgatgaagaaactttcttgaagttataccataaagtactagactatttagataaaaaagatgaactatacgtatttaaaggctacgctggtagcgataaagatacaatgttaaaacttacagtcatcaatgaattagcatggcataatttatttgctaaaaatatgtttattagacctgaatcaaaagaagaagctacaaagattaaacctaacttcactatcgtttctgcaccacattttaaagcagatccagaagttgatggtactaaatctgaaacctttgtcattatttcatttaaacacaaagtcattttaatcggcggtactgaatacgctggtgaaatgaaaaaaggtatcttctctgtaatgaattatctcttaccgatgcaagatattatgagcatgcattgctcagcaaacgttggtgaaaaaggcgatgttgcattattctttggtctatctggcactggtaaaacaaccttatcggctgacccacaccgtaaactaatcggtgatgatgaacacggctggaataaaaacggggtctttaatatcgaaggtggctgctatgcaaaagcaattaatctttccaaagaaaaagaaccacagatttttgacgcaatcaaatatggtgcaattttagagaacactgtagttgcagaagatggttcagtggactttgaagacaatcgttatacagaaaacacgcgtgccgcttatccaattaatcacattgacaatattgtagtaccatctaaagcagcacatccaaatacaattattttcttaactgcggatgcatttggtgttattccaccgatttcaaagttaaataaagaccaagcaatgtatcatttcttgagtggtttcacttctaaattagctggtacagagcgtggtgtgacagaacctgaaccatcattctcaacatgtttcggagcaccgttcttcccgttacaccctactgtttacgctgatctattaggtgaacttatcgatttacatgatgttgatgtttatcttgttaatactggatggactggcggaaaatatggtgtaggacgtagaatcagcttacattacacacgtcaaatggtaaaccaagcgatttctggcaaattgaaaaatgcagaatatacaaaagatagtacgtttggtttaagcattcctgtagaaattgaagatgtaccgaaaacaattttaaatccaattaatgcttggagcgacaaagagaaatataaagcacaagcagaagatttaattcaacgttttgaaaagaacttcgaaaaatttggtgaaaaagttgaacatattgctgaaaaaggtagcttcaacaaataaatttgaatactaaatcaaaaccacccgtgtgaacgggtggtttgttctgcggctataagccttccttactggccagccctaaaagggcactgacaagtcagccaactgcactactattccagcaaccctaaagggttactcttttttctttcttttttatttttctctccagtgaaaggatctaaatattcttccattgagatttggtctgcaacgatatcctcttgtaattgattacgaatataattttcaatcacttttttatttctacctactgtatccacataaaatcctttacaccaaaactttctatttccatatctatactttaagttagcatgtctatcaaatatcattaaactactttttccttttaaatagccaacaaatgatgataccccaagtttgggtggtatactaactaacatatggatatgatctttacatgcctctgcttcaattatctctacaccttttctttcacataattgacgcaatataatccctatatcttttttatttttccatatatcacttgtcttctgtatttaggtgcaaagacaatatgatacttacaattccattttgtatgtgctaaactgtttgtgtcagatgacattaaatagcatctcctcgtgttgattattttggttggctgaccaatatttattctagcacgtagagatgcattttttgtgacaatggtagaaccttttctgaaccatacgcatagcgtatggttttctttttacaattaaagagccaaccgttgttatagtctaacaatggttggctcctcttattttatgtgctaaaaatttataggcaattttattacaacaatgtacatttaaggtgaccttcatgccaaaatcgcatcactcatttaatggaagcagcacgtcttcatataaagtaccgatccctaattcaacgcatgtagtaccacatcttcaaagcttgatagttcccatgcgcacaccacgtttcatactagctatgcgactcaacttggttcataaactctttaatataagtcaatgtttcaaccatcgctggtggtcttggcacatgtccttctgccatttgataaaatgtttcatgcgtggcaccttttaactctagttggtccgctaaataatacgcatgatgaataccaacttgctggtctttccctccatgtacaattaatattggcggactgttttcattaatgtttggaatcgcttggcgtgcctcatatgccgctcgatcttttttcggatgaccaatcattcttcgtagcatgcctcttaaatcgacacgttcttcatacattaaatcaatatctgagacaccaccccagattgtataacttgttactggtaagtcttgaaatgtcaacaatccttgtaaaccacctcgcgaaaaaccaaccatgtggataaatgcatgtggatatttatcatgtagcaaccttaataattgcgtcacatcatttaaatcgccacggtaaaattcgtctttgccttcactcccattgttacctcggtagtatggcccaatcactaaagtttgactatctgaaaattgcattaatctacctgcgcgcacacgtcctacttgacctttgccacctcgcaaataaactacaatgcgatttacttcatgatgtggtgtcatcattaaagcttttacttgtaagtcatctgacaaatatgtaatttcttcgaattgatgcgtaaaatattcaattggcattcgtttacgtttgataaaacccaagtgattgcaccctctctacgcattttaaaatggtactatcttgcagtaagaaactccgttgtgcgagttcaatatcattgatacagttaaacaacactggccctgctgtttctaaataatcgttcttgcttaccaatgattcaacttcgataaaatatacatcttttacaaaatcagtttgatcatgtgtttcaatggtatattgtgctatgtaataaatatttttaactttggcgcctgtttcttcatataattcacgtgtaactgcttcagcactactttccccgcgttcccttttaccaccaggaaattcaatcccccgtaaattatgtttggtaaaaagcaattgatttttaaacgttggaatagctagcacatgattgccatctgctatctcattatcctttttaaatgtcaaattaacttgacgattatctttatccctaaacttcacgcgcatcacatccctacattgtatgttaatataatagttaattactatcgttggaggcattaattatgaaaaagatattcttggcgatgattcatttttatcaacgtttcatttcgccactcactccaccaacttgtcgtttttatccaacatgttcagagtacactagagaagcgattcaataccacggtgctttcaaaggcctttatttaggtatccgtcgtattttaaaatgtcatccgcttcataaaggcggctttgaccctgttccgttaaaaaaagacaagtcagcaagcaagcattcacataaacataaccattaatatggttgtaattgagttatatccactaaaggggggcgaaattcgagtcgcccctcttttaatatgcctgaatgcgccaccacatcttgttcaaaataataacctgctggtgtaacatctcctggataatcacctttacgagcaagcatcgctgtaaaatagcggcttaaaccatattcgtacatgccgccaataaccacttttgcaccatgacttttcaaagtatcaattgccgtttgcactttatcaatgccacctagacgaaatggttttaatacaacaactttcacattgtataattctatcaaattaattatgtccaacaacgatgttgccttttcatcaagggctattggaggtattgttccatccgctacttcatcaagcatggagatatctttaaatggctcttcgatataaagaacctgttcacgcgctaataactgtaactgtgtgaaatcttgacgatccaaggactcatttgcatctataaccaattgaaagtgaaagtctaattcccgtaacactctaatttgatgcatgatttgaggcgtccattttaatttaattctggtcggctttgttgcttttaatgactctagttgtttatttgataagccgctcgctgtcgctccatatgctactgaaaatgaaggcagtacatgaaacatttgatacaatgccatgacaatagttgcccttgcagcaggcgtattttccaatgaatctactaattttagtgctgcttcatacgtttcaaatgatttatttctattatcttcgaaccattgctcaattacatgtttcactgaggcaattgtttcatgatcataccaatctgtttgaaaagcgttacattccccgaaatatgcatttcctttgtcatcaatcaattcgataaacaaacaatcacgatgcgttaaagtgactttcggtgttacaatttgtgacttaaatggctcactatatttataaaaatgcaaagctgtcaacttcatcaaatcatcctctatacaacttatttctttgtaatttacctgttgatgtataaggtaaagtatcaaccttttcaaagtgtttcggtactttatatttcgctaaatgttgtgataaatatgcaatcaattgtgcctttgaaatgtcactttcactgacaaaatataatttaggcacttggccccaagtatcatcaggatgccctacacatactgcgtcactgatacctggaaattgcttcgctaccgtttcaatttgatatggataaatattttcaccgccactaataattaaatctttacgtcggtcataaatcatgacataaccttcatgatctatttcagcaatgtcacccgtattaaaataaccattttcaaacgtacccgttaaatctgttggatacaaatatacattcatcacattggcgcctttaatcattaattctccatgaccttctttattaggatttttaatttttacgtcaacattggcacttggcatccctacagtgtcaggacgtgcatgcaacatttccggtgttgctgttaaaaattgcgaacatgtctcagtcataccaaatgaattataaattggcaggttatattgtaatgccgtctctatcatagtggcagataatttagcaccgccgagtaatattttttgtaaattataaggttcatgtaaaccttgttgcataagccaatttaaagtttgtggcacaagcgaaatgtgcgtgattcgttcatttttaatcatcgttaaaatttgttcggcattgaatttatcaacaatgcgcacagtaaaaccttcaataacagctcttaaaagtacactgagacccgaaatatgataaatcggcaagacagatagccaattagtgtcacgatcaaatcccaagctctctttacatccgattgcactggcataatgattacgaaacgtttgtggcaccgctttttgagggcccgttgtccctgatgtaaacataatcgatgcaatgtcatctaaattaaatgatgtatttaatatgttggacggcgactctttcggcaccacagtttcattcgatgtttcatattggatacccattgtgttgtccaacaaactgttcgttgtaatatcccttccagcgaattcaatatcatccagcgatacaatttgaaaccctcgtaattccagtggcaaggtacaaaaaatcaattgtacatcgattgacttcatctgattcgtcatctcattaggtgtcaaccttgtattaatcatcgcaatttcaatatttgccaaccaacatgcatgtattaaaatgatcgattgaatcgaattatctatgtatagcccaacacgagattgttgataagccttgagtcttttagccaatagactcgcttcacagtataaattttgataagtataagattcttgaccgtctgttatcgcaatatgatgtccattttgttgtgcttgtttatataaccaaaagtccatgcgttattcctccaaaatcatttacattataattataacgattttatgacattctagcagtggttatgtttaaaaatataaaaaagtagacgaattgatgcattgatatgattgttataatgctcaatacatatcgttatatcattcgtctactattatcagttatttttatttaattttagtgtcattctgtcattttgatgtggtgatttacccattgttgccacatcatctgcaatgtcaattggtatacggttcatgtcttgtaatgcacttaaatggaatacttcatcatctaaattttcaatgagatatacataatatgttaccttgtcctttttatattttaacgttttccaaaagtccggcttgcaattcaatacattatccggaatatattcaataaataagtaacgtttgctgcctactttgtctatgaaatattttgcagtgcctttttctatacctcttatatgtgcatagtctgctgaaaagtaaatactacctattgtttcattatgttgttgtatttcaaatcgttggcctactattttattatttgtgctacaactacttaaaaaaatcagtagatatagcattaaacatattttcatccccttgaattttaaaaactttttcaaaagcaacacctctaaaaataaatacaatatattatagcaaatagaaattattattttgttaaattatgttgtcatgttcgtgtcattttgagtcgtaatacaactttacaattattaaattaacacttctacaatccaaaaatatttttaaagttttgaaaaaaaataaagtatttccactactaatttggtaaaatatgattatgtgatatagtgaaagcgttttacacttaataactccctcttaaatgcatccaggttttatgtagtaaatcatgaaaataacatataaatatagaggagatttacctttgaatacagagaacaacaagaatcaaaaccaatctgttaaaaattctgaaagacgcggcatgttaaaaggatgcggcggttgccttatttcttttattttattaataatcttattatcagcctgttcaatgatgtttagtaataatgacaattccactaataatcaatcatcaaaaacgcaattaactcaaaaagatgataataaaaatgaagataagcctgaggaaaaatcagaaacagcaacagatgaggatttacaatcaaccgaagaagtacctgcaaatgaaaatactgaaaataatcaacatgaaattgatgaaataacaacaaaagatcaatcagacgatgatattaacacaccaaacgttgcagaagataaatcacaagacgacttgaaagatgatttaaaagaaaagcaacaatcaagtaaccatcatcaatccacgcaacctaagacctcaccatcaactgaaacaaacacgcaacaatcatttgctaattgtaagcaacttagacaagtatatccgaatggtgtcactgccgatcatccagcatatcgaccacatttagatagagataaagataaacgtgcatgtgaacctgataaatattaaacaacaagcgaattgaattcaaattgtatttagctttatgcactaatcacatagtaaataatgagggagattttttaggcatgagcaatcaattcaaaagcgaagaagagcgaagacaatgggaacaattccaagctttccaaaatcaacaaaaccaacagaaccagcaatacggacaaaagaaatctaaaaaaggatggttctggggctgtggtggttgtctagtattatttattttaattatcatcggtatttcagcttgtacagctggtattacaggtaaccttggcggaaatagttctaaagaaacgaacaaaacccataaaatcggtgaaactgttaaaaatggcgaccttgaagtcactgtaaattcagtggaaactatgaaatctgtaggaccatctcttgcaccaacaaacgctaaaggtatatttgtcgttgctgatgtgacgattaaaaacaaaggtaaagaagcgttaacaattgatagttcaatgtttaagctaaaatccggtgataaaacatttgaagcagataatacaggttcaatgtctgctaatcaaagtgacaatggtagtatagaaaattcatttttcttacagcgtataaatccagatagcactgctcaaggtaaaattgttttcgatgtgtcagaaaacatagccaacgcaaaagataaaaaattagaagttatttctagtttatttagcgtcaagaagattacatttgatttatccgatgctaaaaaaacatcaaaagctaaaaaagacaagcaagatacagaagtagctgttgcgagttcaaatagcgataatgtaagttatgaagcttcggctactacacctgctacaacttctagtgcggatactgattctgaagatagcgaaaagtctagtaaagatgaggataagcagaatgcgtctaaaagtgataaatctagtgtagaaaaaagtgaatctaatgaggaaactgctcctgtagagcccatgccccatagcaaacctaccactagtgaagcaccacctagccaaaatattcacaatgaagatagcatgtacgacgcttcaacagaataaaatttcagggtagctcggctacccttcttttacggaaaaattaattatacataatcaaatcaaggagataaaaaaatgaaattcaaagctatcgttgcaatcacattatcattgtcactattaactgcctgtggtgctaatcaacataaagaaaatagtagtaaatcaaatgacactaataaaaagacgcaacaaactgacaacactacacagtcaaatacagaaaagcaaatgacaccacaagaagccgaagatatagttcgaaacgattacaaagcaagaggcgttaatgaatatcaaacattaaattataaaacaaatcttgaacgaagcaatgaacatgaatattatgttgaacatctagtccgcgatgcagttggcacaccattaaaacgttgtgctattgttaatcgacacaatggcacaattattaatatttttgatgatatgtcagaaaaagacaaagaagaatttgaagcatttaaaaagagaagccctaaatacaatccaggtatgaacaatcatgatgaaacagatggtgagtcagaagacattcaacatcatgacattgataataacaaagcaattcaaaatgacataccagatcaaaaagtcgacgataaaaatgataaaaatgctgttaataaagaagaaaaacatgataatggggcaaataattctgaagaaactaaagttaaataatggcatactttgattaatcgtaatttttaggagaaacgctatgataacatttgagaatatacaacaacttgagaaatacaccttaatgactatgcatggtctttttaatcaacttaaactcggcattatttcaatcgaaaacgcagagcatacgctttttacaccttatatgttggaaacgctctcttccctaggcgtgaaagacagcattgtcgatttaattcataaagggactgaattagaagactttgcggcatttaatttatcaattgaagacacagttacagtctgtttacaaagaactgaagaactattaaaacaatacaaaaatgtggaattcaatgacaaaatattaatcaattggcgtattatacaagagaaatagacatataaaagtcgaatgtaactacgtgagtattgattttattctttgtaaattacaagcatttcatattataaagtttgaaaagaggtatattgaaatggagaaaaatgaatatatagctaaatataatgaatatagtcaattattagacgctacatactcgcaagctgtagcataccttttaagtaaatatggcgctgtaaccgatgattattataaagaaaaatcatacacgcgatttttaaatggagaaatcaaaagtatttcaaaaggaaaatacactagagctagcgaaggattatattgccatcatataagcgaggacagattccaaaatctatctgatctaagattcatttccaaatttaagtactcatacgacgttcaaaagaaagaaaacttagtgtactgtgatctaatcgagcatttaattttacatgcaattattacaaaagaatcccatggccaatttggtgtagctggattatgtcaaatgatcaaaccaacagtcattgattggtacattggcgaatataatccaaaaccagcatggatgcaagccaccaaagcacgtgcctatttgcctggaatattagtagagaaattactcattaaaattgacgatatgttaaaaggaatagaaatataagatttccttgagtctagataaatgattaatgtagatttattttttgctgttgagattttgttatagatgtttaaacctgtaattaaatatattttataaaatagaccacgcatacctatctataaacggacaatgtttataaatgagtttgcatggtcttgaattgtattaaatttcttttggttttaataaatcgactagattttcacaatatttatcaaatatgtattcctaaattatacagccttaatccagcagctactttcgaaacttccaacttagttgatataaggttcaatagtttgtttcgttctttttcagataaaccagaacttaaattgatattattgacttcataaaaattatagactaatgcctctatttgctttttaggcataagtaagtcgactgaaaactgatttacgtcgctttcataaatcatttcatgtaaattctttagactattatcgttactatctctcattaagtctgtatttttaaataaataacggcccaattcacgagctattgaaaatcttgtattattaatcgagtgattattattaatatagattgttcttccacttaaataacccgaagtattaccctccattttaatatatctaacatttaaattaagttgaaataatagcttgtctatgtcaatagcaaagtgttcagaagtaataaaaagttgatccattttgtcctttataaatgcctgaaataatcgaactatttttgattctaaaatatcttcataatgaactttctcaataactttcaattgattccccaccctaactaaaaaaatcgaacctacatcatttaataaatttataactataggtgtaaacattattaaaataaaacctctctactactatatgtaacgaagggacatgatttcaaaataaaataccttttttataaatttattataatatttttcattatactatacaaccgaatctaatctaacgatcctgaaaagaaaaataacggcggttccgcttcatattcatttttgtccaagtgttctttttcaattatttgattgacggttttccaattttttacttcatgctcttttaaaaaatggctatgaaaaattctatccccatagatttcttcatagccaatgctaatttgtttcatgtcatttctttaaaattcctaaaaatatataaactaaaagcataagtaacacagcaaaaattgccgaatatataattattgaaaaagcattgctttgcattggaactaaataatttaaagtacaaaataataataatgctaaaattccaactttaagtgaatattttaatctatccataaaatcacccttactgatatccccatttttctcctgtcagaacgtattccccggctgcattctttttagtttttaattttatatatattcccttactagtatcaatattcgatgcagctatagatccaaggaaaccaccaacacctgcgccaactaaacctcctgttagtgcagaaataacgctaatagcccccgcacctaaagcagctattgtttttgtatatgcagaagaaagatataatgttgcagtatctttacctgtttctacatattgagttttacccgctctcaattggtcttcagctttatatttttttatttcttcttttgtaaatatatcttccagtttataaccttttttctcaagttcatcaaataaattttggttactcaaatatattacctttgcttgagaatggtctaacttatcttcagcatgagctacatctgaattataagataatgaaattggactaacaaataatacaccagcagctaataataaagatttttaattcgtttttcattagtttcttttagatgatttttgtatttagatttcgtataaacagaaactagattttttcatgatcgacctatcttttgtccagatacagtgagacccttgtcatttaaatgatttttaattcgtcttgtaccaaagacttttctattagaattaaaaatatttatgacggcatgttctatgtttgaatcatctttagtgattttattatcttttctttttatagaatcataataggtacttcttagtattatcaggactttacacattgctgatactgaatattgatgtgcattcttttgaatgacttctatttttgccccataatcagcgctacttgctttaaaatatcgttctccatttttaaatgttgaacttctttgcgtaatttaatcagctctttttcttcatccgataagttatcttggtgattgaatgtacccgtgttttgatgttgctttatccattttcctacattttataaccgccatttacaaacgtcgaaggtgtgaaatcatactcgcgtataatttcattcctaggcttaccatttttatataatctaaccatttgtaacttaaactctgaactaaatgatcttctttctcttgtcataataaaatcgcctactttcttaaattaacaatatctattctcatagaatttgtccaattaagtgtagacgattcaatctatcagctagaatcatataacttatcagaagcaagtgactgtgcttgtatatttgccgatgatataatagtagagtcgcctatctctcaggcgtcaatttagacgcagagaggaggtgtataaggtgatgcttattttcgttcacatcatagcaccagtcatcagtggctgtgccattgcgtttttttcttattggctaagtagacgcaatacaaaataggtgacatatagccgcaccaataaaaatcccctcactaccgcaaatagtgaggggattggtgtataagtaaatacttattttcgttgtcttaattatactgctaatttttctttttgtaaaatatgcaaggttttaaagagaaacatcaagaactaaaaaaggctctatgtcaaattggactgatgcgttcaatatccgaagttaagcaactaaacattgcttaacttcctttttactttttggagcgtaaagttttgaacataataatattcgattgcgcaaatgattgtaacttccataaccaaaagatgtacgtttaattaattttattttgttatttataccttctaaaggaccatttgataaattgtaataatcaatggttacactattaaaagtgtcacaaattcttatgaatctggcataaactttgaattaactaaataagtaagaaaacctcggcactttatcattttaatagtgtcgagatttttatagatactacaaatatttataacatagttaaactcatctaatgacttatatttttgtttcatcacaatatgaacaattatttattggacgtattttgctctttttttatttcagaaactgacttaggatttttattaaattttctacccaattcatctgtataagaaatatcggtatcaaattgaaaatcatcaacagatcttataccagctgtaaatgataactttttatcattatttatataaccactaatagaataaccatccattgggttttctttaaaattagcgaagcttatatttttataacctttcacattgtacttcatataaatcgttattctttctttttgttcatcataatatttcttttcgtcatatttcatcttcaaaaagattccgcctagaatcaatattaaaattataattacaatcataagatattttttattcaaaaaatcaatctccttttcattgtacttattgacgaacattttgaataaattaagcatattgagttttacgatgattgtataaacgttacaacccatatgattgttggttttaacattagtcaatttttctttcttataatcttaaatcatgatttggtttactttaacacttaaataattatatttttatccattctattcataacatttattcaattggacctgaaaagaaaaacaacggtggttccgcttcatatttgtcaatagcggtttaagattggcgtgttttaaatacttaatcactttcaaaatctttttagtcagtatgattcttctataatcttaaagattttcatattataatattacacattttttcgaaatcttatttaaacttatttactagtttccttgtggattgttggttgtgttttagaaattcacgtcacaagttcaatataaatattgtttttttactttttataaaagtttgagcggtggcataaatatatagataaatctaaaaattacgcctaatttttgacatgtcattcttaattattttcttattatatttgccatcgtcataaaaaacattgtaccaccattcttgtctatctcgaagagaaattttttctagatatattttccatccaatagacaattttttagtattaagaaagtttaataaactttcttttttaataagtaaacattcattatcaaattcgagtaatttagaattaatacatattgtttcaccaaatttagttttccatactccttcttccgtttgtattaatgaaaaataatctactatttctttacacggaatataaaaacttattgatttgtccttaacagaataatctaactcccaaaaatattcataaatagctggacataatttaccatctgattcagttaaatatccctctttataatttttataagcttcgctccaataatattcatataaatatatactatgtgctcgaggaatattaatacctctatcataattattttcataacctttgataatttcattactatcttctttattataaaaatatcccatcgctaagaaataacatgagtctctatcttcaaatggtatttctttctctctcttttcaaaattaaactttgagcttaaacatatatatctatgattgtctatatctatttctaaaaataattttgtttcatcaaaaactttggtattttttacccattcattcgattgatgcgaaggaagtggtgagggtactagtatttttgattctttatcaatttcaagtaatagtaaagtaggatcaatatctctaatataatcatcccatagtccagaatattgaacatcaggaaatttatctacaagtttagctaaaatttcatagtaagcaatccattgatattttttgctaattctttcaattgaattattaaagttatcataacgattaacccacatatcaaattcaccatgtaattttgcatcataacccatttcaaaaatcctcattaatgctatattacttaagtcttgatcacttttaaaaccctttacccagtttcgtacagcataaccaaatacatatctgccaaaatcgccatatgccccagttcctcttccatattccgttgtcattgagtttttaattttatcgatagaaaaatgtaaatggctatctaatttgttttttaaagattttatgtaatcgtctatatttaaattcgaatattcttttttataccaattacttttataaggtggcctaattttttctaaatttatattagatatatcttttgataaactaatatattcaattgtttgcctagcataatctctcattaaaatatgaggatataccatttctttatcaaatatttcttcataaatataattagcaatctctatatgtatttcacaaatgtcgattcgaagtgtcgcccctaaaacagaagcatataatctttcgactatatatggatcattgttattttcaaataattttaataaaccaataattttagttggaaatgttttgaataattttactaaagatttagtaccgagatctcttaatttattattagttgcagaaaatatccacgttaaaaaaatcatatatttttccgcagtttcttcatctaatttcttatagttactaaatagccaattaataatttcaaaaaccttttcattatttatagatatatattgagtccataaaaaatctctttttcctaaattgcattgtttcaataatttatgtaaagcccaaatatttaacggatggtttttttgaggcatttttattaataagacatctaaaaaattatttctaaatgcatcataaggaataacattatcggatatatagcatttagtatgtttacttatgctaccatcttttctccatactaaactatttataaaagaatatatcatgttataattgtttttaaactgtggaaatacttcaaatagctctatattaaattcatttgctaatttaataaaaagttcattaataagacctctattataagataaatcgtcttccttttgaaaataccttgtcactttttcatctgactgtaatttagttactaaatctcttttatcaacatttctatatttctctaaaaggtattctgataaaaagtaatctcccatacgctcatacgaaaaataaataatcatttcacctttatagccagtatttttaattaatatattttcatctattagcgcttctaaaaatctatttgacttttgaacatactctttagctatattattaacaacagtataggattcctcataatttagttgattaaattctgagtcgttcattaattcaactaatccttttattactttttgtacaacattaatatttttatcaaaatcaaatttatcttccttagataaattaatatttactgtcttaagaacatttgtaaatagctctgcaacacttatagtttggtcaaattccttaaatttatttacacagtactcacacattagttttaaaaataatggattgttgaattctggatttaatataggtaacttaggtagctctaatccataaaaatcacaaaaagatacaattggattatagttttcttccttactaaaaccttcatgctgaaatactacaatattgttatcttgtattgcgtttttgggtaatataacatcttcaaaaggggttctaatagaaaatattaaagctatattagaatacttctttatatggttgataaagctttgaaaataatttccccataaccttttaccttcaccttcattaagcgcatcaataataataaaagctcttttttttgtttctttggccttattacttattgaccttaaaaaattatcaacagaatttgtaacttctaaatcattaagtatttgatgccatggatcttcatttttagtaaaaaattgtcccaaaaacagataaataatatgattttcatctctaagttttttagatagatgcgctaaaaggtgtgattttcctatgccagcttcaccttgaactagcaaataaggataaaacaagcattctttacatgtttcttttaaatacgtttgatattttaataatactttttcgattttactcatataagtttgaagttctaatttttcattctcacttattttgtatatattacattcattatgttctgtcagaaaaatataagggtcaatattaatttcgtctatcaattcataaatttcacttaagtattttttcttttcttcaaactcttcttccagttccaaataattattgactgattgttctaaattagagaatatttttttgaaattcaaataaatattctttgcgtattttgatttcatcttatctaaaatatcattttcgatataaccttttaattcttttagatatgaaatattagtatatttaaaattattggtaatagaaataccttctataattttattattaatagtatcgacatcattattcgcagtatatcgtgaagctaaattcgatatattaaattctaatttttcattaataaattcttcttttaaatatgacaaagaatcttcaaataaaagcggagataattctttttttaataattcaatagcgtgatcttgcttatttatgtttaaattcaaaaactcttcgcataagtcttgagttaaaataatatcttttttactatcgaataatatattatgtggatttgaaaaattcttatttttaatattattattttgatttccaataaatataaactttaatcgataaccttcttccattttatttgttaaatactctttttttagagtgtcctctattttttgctttttacacgttgcggtaacttgaataatatttttattcgtattatctataagatcaaatgctggtgcatttttttgttttttattatgattctcaagtgaatacccatatacaatatttaacaggtctctaaaaaaatattcggaatatatatgattatttaaaatatttatctttcctagttcttcaatcttagtattaagtctaattagtgtatcaagaaatttttcttgattcgttgatcgtttcaagttttaagtctccttttaaaatgaatatttcacttcttataactaatatttaaacaaaatgatcacataataatatttaatttacaatatgccactacagtgtcaacattttataaacactattcatttgaacatggtctaaaacgaataggacattgtaaatgattaaatagtctgtctctagttgatgtatatggtcatttgttatgcagataataattaatctaattaatttttacgttttagttacttggttgtgattgaggctttttgtatctagttgtaatattctccttttttagaatcataataggtacttcttgaaatttttagaactttgcacattgctgatactgaatattgatacgcattttgttgaaagacttcattttttgtctcaaaattagcactgcttgctttaaatcatcattttacattatcaatcgatgtttttctttgcgtaattttattaactctttttcatcacttgttaaaatgtcttgatgattgaatgactcagtattttggttttgttttatctaatttgagaaagttaatgatgttagatcatattctcgtataatttcgtttctaagcttaccattttcataaagtttaattattttaatttaaattatttactaaaagctcttcagtctcttgtcataataaaatcgcctaccctcttagtttaacaatgtctattctcatagaatttgtccaactaaatgtagacgattcactaaacttctaaaaaaataacccccaaattataatagtctcaatattaatatattacaatttattcataggatttttatcatttcaattaataggttgttatcagggttaaataaacattttttgtaatagtccttttttacgttcttttaataactcaattctattcatttgattattcattttattgtctatagattttaacaatgcacttactttatcttgttcagtgagacaaggtattttaagatttatattgcataagttcgcatgagttaatttagctggtgcattacctgtgacaaatgctcgtagttctttaaaatttaaataataattcataaaaaacaaattatgatcattacttttaactacatgcgcatgattatttacccagtattgcccattagcaataaagctactcgtctcaaactgcccccattttgcaccatcttctcctattagtaatcgttcttcattattgaataaataatcttttacgtaatcaataattccagttgcaccatagtaagggtataaccccttttctcttaatgaagaagtaattagttttcttctattattttcaaagataaagatgtcttttatgaatttgttttcccactctggatattcttcaccattctcatctttgaatcgcaattcttgtgtgaagattttctgcatatagccttttttctgttgttgaagcaattcaagtttttgttcttctaattcaatttgtcggtcgagtttgctgaagaacttgcctattttttgctgttcttcaaatatagttggggtgaagatttttaaattagcaatttctttgaagtttagaccttctcgactacctccactttgtgcaaggaaaattttccttttaccttttcttgataatagatactgtccaaaaaaattataataatactcttttttcaatctaataatacatacatgttgatttaaattagcatgcgtttcaactatcgaattaatggctgttctacctattgatgctcctgtaatatttaaaagaacatcaccatagtacgttctactatttttcatctcatcatctatatctttactaatataaactaagtcattaagatttaatttaccatttctaatattttgactccttaaaaatggtatgcctttgtttgtatagttttcacttccacctttgggagtctttccactacctattttggtagtaagattccctaacttcttctcttcccattcgccttcaaatcctgggaatctcaattctggcacatttttcttttgtgtattactcatctttcaacaccccaagttctttcaggtatgcattgatttcttgctcaatttctgcgatttctttatcgatatttttcaaatcttgttggacttgatctaaatcaatcggtgcttcttcttcgaatgtatcgacatatctcggtatatttaggttgtaatcgttatcggcaatctcttgtagtgtcgcgctgtagctatatttatcaattgtttccttacgcttatatgtgtctataatacgttcgacttgggcatcgcttaaatgattttgattttttcctttttcaaaatcattggatgcatcgataaatagtacgttgtcgtcttgttggcgacattttttaaatactaaaatacatgttggaatacttgtcccatagaaaatattcgctggcaaaccaatcacagcttctaagtagttcttttcttcaattaaataacgacgaatgacaccttctgcagcacctcggaataatacaccatgtgggagtacaacggccatggtaccttcatcgtctaggtaatgtaccatgtgttgaataaaggcaaagtctgctttagacttaggcgcaagtttgccgtaaccactgaatcgttcgtcattttcaaactttgaatctgcagtccatttcgcactatacggtgggttcgcaataaccgcatcaaatgtattgcctaaaaaggctgggttttccaatgtgtcatcattacggatatcgaagttctcataacgcacatcatgtaataacatattcatgcgtgctaagttgtatgtagtattgttacgttcttgaccgaaataacgatacacttgtgtttctttaccaacacgtaacaacagtgaacctgaaccacatgttgggtcatacacgtgacgtaatttatctttaccgtctgtgacaatcttcgccagtatcttagatacttgttgtggtgtatagaactcgcctgcttttttacccgctgtcgccgcaaagcgcccgattaggaattcatatgcatcacctaacatatcaatttccatgtcactgtgaacgaatggtaagtcgtcaagattaaccatgactttagagattaaagcagtacgttctttgacattgttacctagtcgcgttgaactcaaatccatatcgctgaacagcccgataaagtcattttcactttcttcacctaatgtagatgtttcaactttgcgaatcgccgtcgctagatgttctatatcgaaatcttgcgtttcaatttcacgaatcatcgcactgaataaatcttgtggctcaatgaagtaaccgacttgatcaattaattctgcttttaagtcttcacgatattcttcatctgcccatgcttcttgatacgtgatgtcttcacctgacaaggcatctgcatattcttgttcggctttttcagataagaagcgatagaaaatcaagcctaaaatgtaattacggaattcactcgcatccatgttccctcttaaatcattcgcaatcgaccataattttttatgtaattcagcttgttgctgacgttgtttttcagtaatagacatgtgattcctccgcctttgcataagtaatttatctctttgtgtaatagatttattataacatttggttatgttgcgatgttgataatttggatgttggtggtggaaattttgagttttagtggcgcaattgttattgaaaaattttatagaaatgttgtagctttcaaatgctttcaaaatcatttatattcttaatgatgtcaaaaagttgttcattcatacataaataaaaccaatcaacaattgagttggtgaaaatcaatcgttgattggctttgatgcatattaaataatgcaatatatattaataaatgttagttatagtatattttgtcaggattgggtgaatgtctaagttttaattatttatctaaattatctgcaatgaatttcttaatttcaggagagaaataaacagcaaatcctcttgtgctttcacctgatggcttattaccggcatagattacaccaatagcttcgtgtttactatttaatataggtgaaccagagctaccaggctgaataattgcatccgatgacactatattcccattcactgataatactttaccagttgattcatacatttgtagtttatttccattaggatttggataaccaatgactgatataggttcattttctttagcttctgatgctatattaaatttactagtgaaatctttgaattttctaccttttggttgtgttgatttttcttcaacttgtacaaccgcaatatcttctttaccaggataatctacaatcttagtaactttataaagtccaccaccgttattataaaaaccattaggatgtgctttgatttcatcaccgactttcatgtgataggtaacatgtttattggtaatgattgtatgatttccaactacaaatcctgttccagcgcccatccatgtaacaccactgtatggtgcaacatttgtatttgtaatttgtttaacagtattttcggctttggctgtttgttgaataccttcaaccattgttgtgccgacaccagttattgatgttaaaatcgtcaatgctgcaatacttttgatgattatatttttattcatttttctgctcctctaagtatttgtataattataatgttagctttttgaagttttattttttttaatcatttcgaataaatggaatcacagagatgatttgaattgttgagtttgttgttaatttttaaaatcatttatctatgtaaggatttatttatctgtgttatctgcaatgaatttcttaatttcaggagagaaataaacaccatatccttttgtacttttatttccagggccgtttccaccaaagtgaacacctacaacttcgtatttactgttaaatacagctgaacctgagttgcctggttctacgaaagcatcagtaataatcatgttgcctttaactgacagcacttttcctgttgactcatacatttgaaatttatttatatatggttctggatagccaacaattgaaatgcgttcattttctttagcttctgatgctatttttaaaatgcctgtgtaatctttaaaattcctgttttttggatgaacagctttatcttccacatgtagaatggcaatatcttcttgacctgaataacggacaatttttttaactttataaaatccgccattattatattcaccattgggatgcgctataatatgtgcaccaatttccatacctgcaacgacatgcttgttggtaacaattgtatttttaccgacaatgaaacctgttccagatcctatcgaaacgacaccattgtatggtgctacattagtatttttgattagtttcacattatgttcagctttagccgtttgttgaataccctcaaccactgttgtgccgacgccagtcactgatgttaaaatcgtcaatgctgcaatacttttgatgattatatttttattcatttttgtgctcctctaagtattcgtataaatataaggttaggtttttgaagttttattttttaaatcatttcgaataaatagaatcacagagatgtttaaaattgttgattttgttgttaatttctaaaaatcatttatcaatgtatggatggatgatttatttatctaaattatctgcaataaatttcttaatttcaggagagaaataaacagcaaatgaccttgtactttcacctgttggtttatcactagcatacataacaccaattgcttctcgcttactatttaatataggtgaaccagagctgccaggttggacaaccgcatcagatgtcactatatttccattcactgatagtactttaccagttgattcatacatttgtagtttatttccattaggatttggataaccaatgactgatataggttcattttctttagcttctgatgctatattaaatttgctagtgaaatctttgaattttctaccttttggttgcgttgatttttcttcaacttgtacgaccgcaatatcttctttaccaggataatctacaatcttagtaactttataaagtccaccaccgttattataaaaaccattaggatgtgctttgatttcatcaccgactttcatgtgataagtaacatgtttattggtaatgattgtatgattcccaactacaaatcctgttccagcgcccatccatgtaacaccactgtatggtgcaacattcgtgttggtaattaatttcacactattttctgctttggctgtttgttgaataccatcaaccactgttgtgccgacaccagttattgatgttaaaatcgtcaatgccgcaatacttttgatgattatatttttattcatttttgtgctcctctgtttattcatgatgcttttgatatagacgtttttttatgttatattcgaccgatgtttttcattaaaattattgaacacatgctcatggtgtatatttaaatttgtttattgttcaatgtgcttttgaataaaatctttgatttgaggcgtaaagtatacggcaccattatattcagaaccaatttttccaataccgccatacaccacacctatgacctcattgttagaatttagaactggtgatcctgaattcccgggttcaatgtatgcatcaaaatttaaaatattgtctttgattctttttatagttcctgtagattcaaactgtttaaaactattttgagcaggtaatgggtaaccaataactttaattttgtcatcaactttagcatctttcgcaaaattgaatgcttggacattttcattaaaattaaagccttttggtccacgttcgactgcttgttcttcaatattcatgacagagatgtcttcatcacccggataatcagaaatgcttttaattttatatataccaccatttcctttgtcaccgtttggatgggcagtaattctatcgccaactttataatcttttgatacatgtttattggtgataattgtattttttccaattacaaaacctgtcgcatctttaaatgaaacgacgccattatatggaaaaatatttgtatctttaacttgcgtaacattcttctctgcatttgctatttgttgtgtctcttcaacgactgcagcatttattccagttactgaggttagaatggctaatgctgccatgcttttaatgactatatttttattcattttcaagctcctttacaattcgagatatgttgcaacgctcgtttaaagtcaatttgtttatttatctatgttttctgcaatgaattttttaatttctggtgtaaagtagacgccatatgcatttctgttatcatcattttttacatcagaagcaaaatgaataccaactaattcgttgttgctgtttaatacaggtgatccagagtttccgctttcagtatgcgctgaatatacaatactgctaccttctactgacatcacagggccagttgactcatataaaacatatttatttttgtatgggtgtggataaccaatcactttaattcgctcaccagctttagcccctgccgcatatttgaatggcgttacattatcattaaaattaaagccttttggtccacgttctattgcacgctcttcaacttgaatgactgatacatcttctttacctggataattaataatctttttaatcgaataaataccaccattacctttatcactatttggatgtgcagtaatacgatcgcccactttgtaatttttcgacacatgtttatttgttaaaatagtattctttccaactacaaatccagttgcacttttaaaagcaactacaccagtatatggaaaaatattagtatctttaacttttgtgacattattttctgctttggcagtttgttgtacttcctcaaccaatgttgttccaatacctgttacagatgttaaaattgttaatgctgctaaactcttgatgactacgtttttgttcattttaagttcctctcttttaattattttgatatctagatacataattcagtatatttagttaattatgtaaccgttttcttaatcactctttaaaaaatcaacttcacgaatgaattgatgatacttatttttcaatattattttgaataaattcttttaattgtggtgtgaaataaacaccgaaattcttttcagattcatcttttccactacctgcatataaaataccaatcagttcatgtttagaattcaatacaggagatcctgaattacctggttgtgcatacgcatcaaattccataaacgttccactgatatggttaatcgttcctgtcgattcaaacattttatattttgtttgtgcaccctttggataaccaataacagaaattctatctttcacttttgctccgtctgcaaattttgtataactaacgttcttattaaaattcaaaccttctgtacttgtttcatgaacatgaactatcgcaaggtcttcttttccgggatattctacaatgtctttaacgtcgtagtttcctccgcctttacctttactcgaatgatgtgctgatactctatttttaaaaatatcattacttttagcgatatgtttgttagttacgattgtatttttaccaacaactacaccagtaccacccacaaatgctaccactgaattgtatggttccttagttgcatcggtaatttctttgacattcttttctgctttggcaattgaatgaggctgattagaaatattttcagcaaaaccaagagatgttaaaatagttaaagcagttaaacctttaaccattacatttttattcatattttacctccttccaaatttatttttatagttaatgtatctagatacacatttactatatacattttaaataaaaatattaattaaatattaattaaccacttattaacgttttattaaattattttacatgaattgactcattttatttaaatatgcttaaaactcaatatcacgcaattaaaattgactttttaggattattttggtcttaaatattaattattgaattaaaattgtaatatttattcggaaattaggtgattgaaaatatatggcggaatggtgaacaattcatgtatttataatctttcactttactatgtattgtgtttaacaacattattagcgattagttcccctattatttatgacaatatgcagtcaatcaatgaaacatgtatgtatgagtatatttggaactagtaatgtattgttaaatattgaagatgattgaattatggaatttttttcgagatatgttatttcggggatcagattttgcgattttgccttggatagagtagttgcgatttgtaaatacgtttttcaggttcgattcaatttcgttgttaagataatatggattagtttcactgacatgttgatgcatgtcttttttgttctgataaagtataaaatgtttacttaacattacttagtatgacacctgctaattcaaacattatttgagacattcttttcaaattaattataaatttttacctatagactagtttgatatttatctacatctcaaaattctcatcaacaatctttcacatccaacatttttactttagtttttataattcaaaacaacaaaactatgttaaaaaattattctattttttagttaatagatagttaatacatttttgatatttagttaattgttcttttaaaaaattattattatattttcattgtaaacgtttacaatataaaaaaaggagcaataaaaatgaatacaaaatttttaggtaaaacattagtagcaagtgctttagtattaacaacattaggaacaggcttacattcttcatacttaggattagatacaaataaagttgttaaaacggctaaagcagaagaaaaaatgacagatggtcaattatggaaaaaagttaaagattcattacatgattctgatattattttaagtaacgagtacgaaacaatcaacgttacttatttattaagcaatggatattctagcagcgtttctgctcctggaaatgatgatggaggccatctaacacaatctatagactttaaaggattaaaacaaattgatttaactaaggaaaatgtctacgatgactttaacaaaaagctagatgctaaaaatacatggaattctctaaccgagaagttaaaaggtcttggtttactacaaaatggccaaaaagtatctatttattcttcagatagctcttctccagtctcgggtaaagtgggagaaggagtaactagtggtggcgaaaatactctaactaaacgcttcatcaacaaaatcacaattgattaaaccttaaactcaaatttccttaattcataaaacattaataactaaccctttcttacaaaccacctagcccataatatattaaaacgtcatttttatttcaattagcggaaaataaaaaaaccattccgcattaactttggcaagttggaatggttaaaaaaatattttagaagccagcgtttggcttgcttagacgacatgttcgcgcatgtcgtcttatttttacatttatataataacacgcaattcaataaaatgtctaatcaataaacctcaattacattcaaattcaaaaacttttcacctaatattcatcgcttaaataaacattacgtttaattaaacagacattgtcaatcgcgtctaatacccctgctgtccgaaaacaaaattattttgtattcatatttaactgttctctttcctcccttttcaacgcaactaaatttcttttaccgttagagccccaatctttaatctttaattgttctaccgctccatttattaaatcctttaaagagtaaaactgctaatagcaacgtgataataatatagattgccaatgttaatgtaactggtatactcccttcgataaacatataaacgtaacgtgtagcatatgtgattggtaaatagaaccacgaatgatctccaagcacttctaatccaaaataaacgttaaaaataaacattaaaactccgacaacaatagccattacatctttaatgaaaatactaaaaataaaaagtagcagtaatataattacattgaaaaacaatgatacgcctataaacataagtgttattttcatatcatgtgaatgccacaataaattaattgatgctaatagaatacatatggctgtaatagtataagtaaaaatcattgatgcatttaaccaatttagcctattagcttttcctaaaatatgattaaagtgaccaatattttcttcaaaattgataacttgatagacgtttatagaaattaatagcgatgtaattgcattaaaactcgctgtaaacaaacttatttgtcgaccattccataaatttacgtttaaataccaatttataaataatataaacaatatggttacaataatgggtacaaatgtgagcgcttgcttagaaaatttcaacttacatgactttaattcgttaattatcattttaatcgccaacttttcttattatttaaaaatgttactatcgcgaaaataatgatgctaacaataatcgaaatatataaggcattgagatcattaaagtattttgaattatggtttacaactaaaccattaggtagtataccaagcgtaataagcgggattctctgcattatcccccacggcaacacccaaaataaactcttcaatgttaaaaacaagacacaaatgactgataatactaagtttattaatattgatacgaacacaccaaagtatcgagttaataaaaagttgagcggtatcaatggtagagatactacatacatcaacaatattgtcaccaataacaacatagcattaaccggatgtggattaataattaggtcacctatataagcaataataaatactaaaaagcaatgtaccaaaaatgctattgataaaatgaaaatctttgctcttatttcttttgtaatcgaccaattattacttaagtaataattaaatgatttatttctcatttcaattttaaataacgaattacaagccatacataatacaatcgggatgaaagcaattggccaaatattaaatagtaaagttatatatggtgacacactattcgctgttcccgtattacttttggcgaataagactgtgaaaatagcaaaacaaagaaataccagcggacttattaataaaacatacatactgaaagaatttttaaatttgataccttctatctttaaatgtatcatttgtaatcacctttcgttattttgaagaatatctcttctaagttttcatctttgttatttctttgctgatattttagctcaccctcatgaataataccgatatgatctgctaaaacttggatttcagataaaatgtgacttgaaataataatactagtaccttgttctgttaataattttagaagttctctaagttcttggattccatatgggtctaaaccattagatggttcgtctaatactaaaatttctggctttttaattaatgccattgcaattccaagtctttgtttcatacctaaagaaaagtccttaacctttttctttttatcgacatttaaattgactaagcttaaaacactattaatttcgctgaaatcaacgctttcatttaaacacacaattttcaaattatcttgtgcacttaaatgattatatgtcgcaggtgtttcaataagcgaaccaactttgtgcaaatcatttcgtgtcattggtctattatctaatttaatttcccctgaatcttgttgaagtatgccacatataattttcataagtgtcgttttaccggctccattaataccaagtaatccataaacttcgttattttctaaagtgatattaatatgctttaatacatcttgatttttaaaccgcttcgaaatgttttcagtaactaattttgccataatcaaaaactcctttgatttattaacttgctttttgatttgctacatttaatgctttatacacatcaagctcaccatgcccatatctactaaatggtttattattcttagatgtcccatgctgatataacaattcaatcgctttatctggatgtttttcaagatgatatttatcaatgattaaagctagtgctcccgaaactttaggtgtggctaatgaagttccagcttgataaatatatcttccgttattggcagtagttaaaatgttctccttatgcatatacccttcattcatccatttatccacaccgaattgatttaaataagcaaatgatcctccgggcgcagcaatatctgtataattcataccaaaattggaaaactcagatagattactcttttgatctgtagatcctactgtaacgacattgtccatagatgcaggaacatctttcacttcgccattaccttgatattcacgctgtaattttagtttctgtttgtcattgacatcaataccatcattaccagctgcagcaacaacgatagattttttcttcttggcgtaattgattgctttctgtaacgcatcgtattctactttttcatcttttctaaatgtttgatggtcatttttgtccaaaataatataactaccaacactaatattaatgacttgatttccatcatttgcagcttgaacaatcgcttttgatacccaaagcagttctgtttttttactaccaaacacgcgatacattgtaaatttgttattcggtgcaacacctattaacttaccattagcactcgtttgacccgacaccatcgtgccatgtcctttcctatcattgacatcgtgaacatcacctgtttcctccggttcagtacctctaaaaccgtttaaaggtactaaatttttagaatcagtcgagaaattatttttcaaatcgtcatggtttttcatcacacctgtatctatgattgctattttggtgttagcatgttttggcaaatcatcatacgatgcaccattattggttattttattcatatcccattgtcttgaaaataatgactcatttgatgttctgtctattgttttctcgctagtaatacaagttgaacatgtggcattgatatatttaatatcatttttatagtttgctaaagcattagcatgcattttcgtcattttaatctgtgccacatgtaattccggtatattatagacaacgtttaaggacttctttttaactaacttgttaaatgttgctgtatttttgtattcaacactgtaatatagttcttctgacgctgatgcattactcattgtaatagatattaaaagactcaatattattaaactaataatagcgcgctttatgattttcatattctaatctcaaatgaattccagaactttatatggttcaggtgcgacaacattctttttaaatgtttttgacgctaattcataactttctgaaatatttgctggatatattgatacaccataatcttttaataatcgaatattattttgagtaactggattttcccacattcgtaaattcatatttggaaatatagaaagtttttcaaaagctgtatgacaaatagttaataataaattgtcacatataccatttgcaattttattaatcgtattagaagtcgcaggtaaaataataatcttgtcatgtttatttgctatatctacatgatttaaaaaagggtcttcaaattcgtcataatagttatcgcaaaattgctttaatatttcaccattaataaactttctaccgtttgttgacgcgattacatttacttcatcaaattttgattttaattcaataatatagtggctaatattgatactattaactgagccacacaaacaaatcaatacattttctcccatgatatacgcctccattcagctaattaaaaacgcattggtccaatttttttcattgagaatttttgtatttttcagtgtcatcaatgttagatagacccctaattcaccttctaaaaggccaactttcctacttttaaatacatcttgcttattttcattaatgtctataaaattcaccagataatcttccttataatgagaaatcagtttatttattaatacagtgatataatcagacacttcatttaattcaaaattcaaattcataattgttaacattaatatttgtgatgacaatccatgacaaatagttggacttattaaattttcatctttatcatttactacttgtagcatcacttttttagacattttaattatttcatcatcttgtaatgcttggccgattaaaaacaacgtcgtcattacacccgtattgccataacaccaaccattccgaataaaattgaaatgattacgttcagaaattaaatcgtaacgctgcaaccatctttcgtggttacaaaatttttcgtccatgataaatttgtacatgtcttttaatatgtgctgatgattttcaatcgtaattcctttaatcacgcataatgcaaataaagacatcggtcctagcactccatgtgcaaggccaagattgatattaccttcagtaaaataatttttatcagactctaaaaattgactttcttgtgggactacccagctatttttagaatattgaatatctttaaagtatactaatatgctttttaatgctttaacattaaattcattctcatctactctatttagcaaatatctccctatcccagctaatccactgacagtatcataatttaatggatttaatggttcttgtaatatttgatcaaatttattttctatttcatttacaatgtgaccatcaatattatttaaaatattttgataatttttgccattttgcgatgctaaatccattgaaaatgcaatacctgaaagtccaccaaacaaagaattgttatattgaccactctgtaaatatggtgctaatttcatgatgtacttatgcacaatttgctcagtattaatatcgaaaactttttgataagcatctaaaaacaaaatgatacctggtataccatgtgataaagttgaaggttcaaaataatcggtttcagtagatgcttttgaaatgaaatcatctacttctgaaatctcttgaaacttcttcttcaatattagattcatatcaatcatttttgtcaccacaccaatgcttttgagttttaacaatttcttttacaatagataaaacaaatgtttcttgatccttatcaatgccaaatattcgattgcagcgcatatgaattaagctgccaataatccttgaccttttagtagttaaagtttttttaagcccttcatttaatttgctcaaaatttggttgccatcttttaaaattcgataaataccactatagtgtttagccatatattcaaaattattagcaggattacatatagttacaagttcatttttaaaaggtctaatatctttacttttaaatgatgtaggtacatagttattaacaatttccatacgctcttcattagaaattgaaaacatctcaaataaatacattattgaaatagcaacaatatatggtcgatcaaacttaaaatcattttcaataatattgacagctaaattcgtgtcatattcaaagaaggcttctatttcattatcgttaatcaatgactctacatctttttcatttatgactatctcatcgttatttctcaaggcatgtaaaaatttttgcttaagcattacaatattatttccatcggtttcttcttcttgaaaaattgttgtcccgaaacctgttatatctgaaatcaaatctttaatattcacgagttgttcaaatccatacttttcaataaaacggttgtgaagaactttcaaatctgtgaatccaatattatttcttgataaaagccacaataagtacgctgcttcagatatatttgttgctatatcttgatgtaaataattgttaatcatgtcaattttggtatcaatttgaagatagtttttacatttgaatagtgccttcatatgatgaataatgtctttatataattcctcgccaaatccaatttcagttttttcataagctaatatcaatttctggatttctctaatttttttcacaaaatcatcattatgtaaagaaagtttatttaaaatataatttaaattatcgctatatgataacggtggtctgattgttgaatatataatttcctttgagacaagattatggatatatactttcactttagtaatatcattaatttcaaattcttgatttatcttttcagctaaatttgaaaaagtaatattattattcgtcacagtggttttgatgaatacgagtaattcgctatttttaatggaaaaagatgtatctttattgttgtttaaataaatagcactttgttcatttaaatatattcgatcattgataatatgtgctttactattccaaataactttcaaattttgataatattcatcaatactctcaatataactaaccagtttatacaaccattcgccatcgactttcacatatttttgaatactatttccaactttaagacgtgttggttcatttacaaaatgccccaaattaataccacttaataatccaaatggagttggacgtgttgacattctaattaaatattttaataaactttctttagcatctctaaccttcttgttatcgccatcaaaatttatttcttgtaaagtacaatataagttaaatgttgttgttaggattgattctttcatctgagcatttaattgtaagtcgctatatttaatttgttcagtatttaaaaataaattgaaaaattcaactgataataaaggtgttctaatcatacaaatacttgacggttcgtaaatagtgttcatttgtaagcacctcacatatttgaatagacaaatagagccctttcaggctctatttgctgtaatcttaacagcagaagctattaaaactaccagtcttagcacaaccaggagtacataaactatgacttgtaatacgttcgtcacctgctgaatcatttgagttattgtttgctttaacttgcacgtctaaatcaagaactttttccatagataaaacctcctattattagttgaagttaaggcctacttcaattgtcatattatcccttttcacacaacaaatcaataaattatataattatattttgtgaattttttgtaaacacttattaatttagtaatactattttgataattagatttttgtgtttttttattactatttattttcactaataattttgcatctaagttcataattttaaatttattgatgaattttttaatagattaatcaattcatttatacaaatacttagatatttttatctatcaatactattacgaatttggagatggctgcttgagattaattaatagatatttatgcagttttgttctatttatacaaaatttagcaaataataattgaagttattttaaagatgaggatataaacatataatttcaatgacttgattattttcttaaatgacatgttctaagagggtcaatataataaccaaagcttgtcattacttatatgtaaagatagaggctaattacataatcctaacttatttaacaggaagtcatgaaaactatattacaactaaaagtataactttccatcaccaaagtcagaatttattgaaacactcaactgataatatagaaggctaattataaaaatacctggcgattaataaactgtttccgttttttagcacttaatatatttaaaaagacaaatagagccctttcaggctctatttgctgtatccttaacaacagaagctgttaaaactacccgtcttttcacaaccaaagctacaaaaaagatggctagttattctttcgtcacccgctgaatcattagtgttgttatttcctttaacttgcacgtctaaatcaagaactttttccaaagataaaaccccctatttaaaagttgaagttaagacccacttcaattgtcatattaatcattaccacacaataaatcaatgaatttaataataattatttgttattaatttgtaaatcgtcattaattttatggtactattgttagtttaaacaaataatgtaacttcttttttaatatgttgtgaatattttttgtttaactcttaaatttcgggtttaacttcctctatttctaacagttatactccaggattagtttctttagaatccgtaccgattaatttaacagtatggttttgccagtcaacttcataagtagatgtaaacgttactgtattttgatttttgtagttattaccaacccagtgtagtcgattccattgattagtatatctatccatttctctttggtaagttactttgattttagatttttttgtatcattttgtttatgagaaagtacgcttataaattctgggttaaagttaccacgcgccaataaaggcatttgatgtgttggcaagaaattttgaccagcatttgaactactttgtctaccgcctaaaaacagttcattaccatatgttgggtcataactatctctaccatatggtccccaaccattattcataattttgtgcgcctcaacaccccagccaattgatttatgatttgtttttctatcaatcgtagttctgtaactttcttgtttataatttatcgtttctgaaaatgattttgatccatttaatccacctgataagccattagatatattaatatctccgccataagaataacctaatgtttgttgaacttggaattcttcattttgatttttaggtgcatagtcaacaacatttacagcatcatttgattctgaactaaccgaaacattatacttaccgccccaataaaactgtgagtaattgtaatcttttggattaggctttttataacctgaattaatgtttccggctgccttaagtactaacgtatctttgtcataacttttatccttaatgaaattaaacgttaaaatttgagaaatattcaatttatcattatcagatgttgctgttgttttgtataaagtgattttgtcatctacttttttctcgcttacaggtgtgatatgttgagctgcatcaactgtattcgatagcaaaagcagtgcaattgatgaagcaactgatgatttgactaattttttcattttcatattaattatgtcctttcactttaatttcgtgtgttttccaattaacttcatatctaactacaaagtttctatttacaaatgcattatgctttctttctgcgtaaataccagttctagggaataaagtcgcatatgtaatatctaagtttctaccatatgaaatttcaaattcactcgtatcacttgaacctttttcatgtgatagtgtagtgataaacgatggattaaagccactttgaactaaaggtggcaattgattatcaggagcaaaatattctcttgctgaacctgttggaccatttggactttgtacgaataaatatctatcatgcgcagatttttttccatcaggcgtaacaaattcgtttgctttaacaccccatttaacagattttgagttttgcttgtctacttcactgacataactcttttgggtataactaattgttttagaataattaaatgagccattgccacctatagatggtgctgactggaaattacctccaatgttatatcctaatgtttgaccaacatcagtagtttctattttgtttttaggaaggtaattgattaagctaacatttggatctttagtcgtcagtcctatattatattggaatggccaaatcattcgtttagttaattcatatccactacccttcacatctgaaaatgaagttctggaattaataaaaccttgcattttaacaattaaagcgtctttgttatattttttatcttttacaaagtcgaattggacattttgagtaacgccccatttcttactacttacatcctccgtacgtttgattacttcagcaccatcaccaatattttcaatattagtatttgctctagattcttgaatcggagatgctaaaggtgcaatcagtcctactgacaaagttgcagctaacatttttttcttaaacataagtttcactttctttctatataaatttttaatacaaatttattctagattatttcacttatttataaaattaactgttcattaaaaaataaaatgctataaaatattaaaaatgacacaatttattcatttatgctgctgaaaaccggtcattttggcgcaaccttcattacctttaaatagttccctttatattcgaacaatatgataaaattaccgatactcaatcttttctctgtaaaaataaaaacgaactttaatcaaatcttcaaaaataatgtttgtattatcacaaataatctataattgaatttaaaattaactgattattaactattgtccgttaaacgaagatgattacttcgtatactgttataactgaaatgttctatatatcatttcgtaatatcgcttacttcatctaaaaaaatttaatgctatgatttagtctaattaaaaacatatatatatttactatgaactaaaatttcactttaaaaataaaaaaccatgatttcgaagtcttcataaactgaagcttctactctcatggcaatttatactatgatattcaattataatgcctagtctcatagtaaacggctactacattcgcatgtacttcgttttactgtccacgcatggtcgttgacttatttatattataatataaatattttatttttcaatacttaattttaaaaatcccctatgaaaatgttgatgagctacatctttaaatcttattatacattgtataaaattatattgcgaggtagtaaattgatattatacacttttggttgtgtatgcatctcacctatcttttttgcttttttcaaataagaaagtattaaaaattaatgcctatacaggaacagacatggctaaacttgatttaaatagtcttgacgacgagcacgtaaaattattaataaatgaattaaaatatccagaaactcatatcgatgtaaatgaattaaaaacaatagttgctagtcgaataaatgaaaggcaagaaataataagttttaagttaggaataaagtacttattaacaataaaaagagggaacatagaaaaagataggttttcaatttcaatcattttcaaagatacctatcacaccctagttagaatagatattaacggtggtactcacgataatccagatggaacaatcgctccgaaaagtcatattcacatatataatgataagtatgataaaaaggataggtttgcttatgaaattaacttgaaagatttccccgacatctataacttgtataatgtgtatatgtcgtttttagagtataataatataaaagaccttgaataaaggagggataatatgactacatttgatgctaaaaaattaaaaaaagaatatcttgattggtataatcagaccttagagttttctaatttatcaaacaatgtagtaagaatagatactccttttaaagataattctttagataatttaataatttacgctttatacgatcagtccagagacatgattacactgacagatgacggctatactatatttgatttagaaaataatggtatttctttaaataaatcaaaaaaacgtaaaaagatttttgaagagcacctttcagcttacggtattaaatataacgataaaactcacgaaatttttgttcaaactaactttaaaaattttaataaatcgaaacataatttattacagtgccttatatttgttaatgatatgtacttactttctaatcctaagtcacagaacatatttacagaagatgttgcaaacaaattggatgaacataacatttattacggaagagatttacctattataggaagcagtggtgttgttcataatttcgacttttttattagcgctaagaaaaatcaaaaagaaaaatttatcaatgctatttctaaccctaataattctatgattattaagtcgaaaataacggatgctatgcaagcaaaaaaataaaaagacacaggcaaaatgagtttatttttattttaaatgactcaaaaaaagaaataaatgaacataataaaaatcttcttcatgaaaactatattagtacaatagattatagcgaattagatgaaaagataggtttattgatttaatatatatagacgtgataatatcaatgtttatattaaatgaaacgaatttgaaaatttcgaaacagcttaagatagcaaattgaatagccttattgataatgcagaatcgtctacacttagttgaacaaattctatgagaatagatattgttaaactatttgggtaggcgattttattttgacaagagtcagaagattatttagttcatagtttaagttacaaatggctaaactttatgaaaatggtatgactagaatcgaaattatactcgaatacgatttaacactctcaatcttctcgaactgaataaatactgggtcattcaatcatcaagacaacttaataagtgatgataaatgttcataccattttgcaaatataaccagatactctcaacaaaatgtagagttcaaaattaaaaatgtccctaattggcacattgctgtatgataataaattcaacttagatttcaacaatataactaatgatgcttatatttaccgcgatatcaaaccaaacagcccatccacaaacaaattagaatatatcatgttaataatagtaaatgatatatcttccaaagaccgcaaactgtagcagaacatgagaaccttgcgattttgaaatggtctaataaatcaaatatcattgaaactttaatcacataaattaacagtagtcacctgttcgcagttctataaattacaaatgcaataaaggctaaagtaaactaattactttagcctttattaataatttagtcgaatttattaaaaatcgactaactcctggttatgctacgctttactttataatccgcacgtagatgccgattgattatattataatattattattttattttttcaagcgtatatataatatttgattttctttaagtaacagctaaacattacatttcaaaacgattaggtcatgcagatgtacatacaacgcttaaaacatattcacatttgattaaagaatttgaagataatgaaactaaatttatagaaaaaaatctgaatgatttgttttgtgactaaacttcaaaatcttgtgactaaaattaggattattcatcaaaaattagtcacattgtggctaaaaaattttaaatggatataaataaataagaagtgtaaaaatgaggataatagctcaaatgcagatatatcaagggattgagtccaaaataaaaatagcgcttaaaatgggtaaaaccaatttaagcgcctttacggaaggtaagggattcgaacccttgagacgcttgtgacgcctacacactttccaggcgtgctccttcggccagctcggacaaccttcctcaacaataaatatgtaataaaaaaacagaagcgatatttcacttctgcttgtatgactcctacgggactcgaacccgtgttaccgccgtgaaagggcggtgtcttaaccgcttgaccaaggagccatggctccacaggtaggactcgaacctacgaccgatcggttaacagccgatagctctaccactgagctactgtggaataatagaaaataatggagcgggtgatgggaatcgaacccacaacatcagcttggaaggctgaggttttgccattaaactacacccgctaatgtaaacgattatggggcggctgaaggggatcgaaccctcgaatgtcggaaccacaatccgatgtgttaaccacttcaccacaaccgccatgaattaagaatggttcaggacagagtcgaactgccgacacatggagcttcaatccattgctctaccaactgagctactgaaccgtaatggtaataataatggcggtctcgacgggaatcgaacccgcgatctcctgcgtgacaggcaggcgtgttaaccgctacactacgagacctattaaattaaaaactatgtattgcgggaggcggatttgaaccaccgaccttcgggttatgagcccgacgagctaccgaactgctccatcccgcgctaatattattttgaattacctaattaatataccataatcaaaaacctaaagtcaagaactttttgaatttaatttaaatgttatctcttaaataattacttaaatatcgtagcaacatgttctctgttgaacacaaatattagtatattcatttttgtagtgtacgtcaacgacattttcaaagtttttgtgtaaaaaaacgcttcttattcccttttatcatataagtgtctaatagttgtcataaatagtgttaaagcatttaaaaaggtataggagttataaagtttacaacgcctataccttctgaaaaagaaattataaaagcttgttacaccgcatattctttcagtcagcgactaccaatataacattgtagccctaagacattgcttgacgcctcaattacaacaatttttcaaaatcagcagctacctactgacacaacataacacaacccatacactaactatcgtgtcatgtaatcttgcatccgatcttgcaacgctgtaaatgtttcgaagccatcctcttctaagaagtgccctccatcttccacgattcgcaagttcccctctaatgcattcattaaacgctgggtctctttatatgaaacgtatttgtcatttttagaactcaatccgtaaaaattgtcaactttctttttaatattatcgtaatcaatggttacattacttaaatcaatatctaaatctatattttctgcatcttctttaaagcccgctatactgaaaaagccttcaatcggctgatcaatcatttcaatatattttaaagctgtgattgaacctaaaccatgtgttacaaaatatgtatcctttttgcgtacattaatttgtttcgtcatagcttcaatccactgatccactgtcttcgcttcaggggattcaaaattaaataatgttacgtcatatccttctaaagttaagttatgctccaaccactgataccaatgatttctactatttccatgcatagaatgtacaataattacatctgtcatctcattctctcctttcaacttactacttcttttctatttttaaaaaaatgactgattacctataattgtaaaataaaaacaccttaattagaaatgttatatcgcaaagtgacatttctaattaaagtgtattgtcatcatttcaatatcattcaaaaacagctaaacctttgtctctgcttcaatttcacaaaaataattcccgctgaaagtatctatatttacacattacttccaccattatataacttaaaaatgactatatttcatcaaacattatctaaaggcgtcgcacctacaccaacaccatccaacaattaacttacaactctgcgattacttcttcagcagcaactttaccttgcgtaatacaatcaggtagtccaaccgcttcaaaagatgcaccagttactctaagtcgtggatatgtttgtttaatatgtgcttgaatctgtctaatttgttgaatatgaccgacatggtactgtggcatacttttcggcaaacgattgacaattgtaaattcaggatcacctttaaatgtcatcatttgacttaaatctctacgtacaatcgatactaattcattatctgtatgatcatcaaccacagtatcacctggtttacctacatacgcacgaatcaaaaccttaccttccggtgtagtaaatggccattttttcgatgtccaagtacatgcggtaatgtctgtatcactcgttctcgcaattacgaagccagtaccatcatgggtattttcaatgtctttttcatcaaatgccaatacaacagttgcaacagtcgtactatccatcgttttaaagtaatcaaatgctggatcttgtccgaaccaatttaaaaacacttgatgtggtgtcgttactaatacgccatcatacacttcttctagttgatcattgtaaacaattttatattgtttttgagatgtaattatatcatccactgacgtattgtagcgtattgtcacacctttatttttaacatcttgttctaatgcttcaataaatgagcttaaaccatgcttaaattgtttgaattgtcctttcggtgcgccaggatataattgtctttgtttcagacgcttatttttctcatccttcataccttttatcagacttccgaatgcctcttctttttctttaaaattaggaaacgtactcatcaaacttaatttatcaatatcggtaccataaataccacccagtaaaggctctattaaattctcaagtacctcattacctaatcttgctctgaaaaatgcaccaacagaaatgtcaccatcctgcatttgagtaggtttttttaataaatcaaaccctgctcttaatttaccaagtggcgatattaattttgtagtaacaaatggtttaatatctgttggaatacccataattgaaccacctggaatcggatataatttatttttcgcaaaaatatatgattgtccagtcgtatttgtaacaatatcttgttctaatccaatatctttcgctaattctgtcataatcgtttttctacctaaataagattcaggccctagttcaatcatataaccatctttacgatacgattgaatctttccccccggacgattcgatgcttcaaagatggttacatcaatattaggatcttgctgttttaaaaaatatgcacttgataaacctgttatccccgctcctataatagccactgatttagtcacaacgtttcacgcttctttcgtcattaaaatatagacttgatttcatcaacaattgcaccgataaataatggatgtgtattcggcatttttggacgataataattcgcaccaatatcatcgcaaactactttacattcataatcattgtcataaagcacctctaaatgctcacatacaaaacctactggcgtatatataaagtttttatactgatgtttttcatataaatcacgtgttaaatcttgtacatctggccctaaccaaggtgtacctgtattaccttcagattgccaaccaatcgcgatatgttcaatattagattgttctttaattaaaagcgcagtatgttctagttcttgtggatatggatcattattcttttcgattaaaccttttggcaaactatgtgccgaaacaactaataccgtgtctttatgttcctcttccggtatttgagctaatgtttcgttgactttattcgtccaatattcaataaatttaggttgttcataataatgtttcacatgtgtaagttgaataccatattttgcagcttcttcatcagcacgtttgtcatatgatcctactgaaaatgaagaataatgtggtgctagtactaccgtgattgcttcagtaatgccatcattgtgcatttgttcaaccgcatcttcgataaatggtgaaatgtgttttaatcctaagtatagtttaaattcaacatctgcatatgctttatttaatgctgaaactagcgcatcagcctggtcatctgttgtacctgctaatggtgataaaccacctataaattcatatctatctttcaaatcttgaagttcttcttcagatggacgtttaccatgtctaatatctgtataatatggctctatgtcactttctttataaggtgtgccataagccataactaataatcccatttttttagtcattgataataccttcctttaaatgaattatctttcatgtgcttcaatgtaaaactatgattatctttgtgtatatgtgtgtacgaattcgcttactttacgtaacgtctctggttgcacttctgggaatacaccgtgtcctaaattaaagatgtgtttaccgttctccataccttgatctaatattggtttcaatctctcttcaatgacattccatggtgctaataaaattgatggatctaaattcccttgtaatgttttagtaacgcctaattgttgagcctgattaatagacgttctccaatctaggcctaatacatcaatcggtaaatcattccattcattgattaaatgactggcacctacaccgaataaaattaccggcacatcatgtttttctttaacctcactgattaatcgaatcatatgtggtttaatgtaacgtctgtaatcctcgacatttaatgcacctacccatgaatcgaaaatttgaatcaattcggcacctgcttcgacttgagctgttacatatttaacagatacatcaactaaatgattcattaaagcaaaccatgttgcttcatctctatacatcatcgcttttgtaaaattgtaatttttcgatggtccgccttcaatcatatatgacgctaatgtaaatggtgccccagtaaatcctattagcggcacatttaacttttcttctgttaaaagtttaattgtatctaatacatatggtacatctcgttcggggtctatttgagaaagtttctcaacatcttgaattgttttgattggattatgaatcactggaccaatacccgatttaatttctacatcgacaccaattggctttaatggtgtcataatatctttgtataaaattgctgcatctgtatgataattatcaactggtaaatgtgttacataagcgcacaactccggctgatgtgtaatatcgaatagtgaatatttttctttcaattttcgatattctggttgcgaacggccagcttgtcgcataaaccaaacaggtgtatgtgatgtttcttcacctttgatcatttttaaaattgtattgtttttattatgcaccataaaggcctcctaaattaaaatcattcttatctatattatcatatcgctcattcgttcgtattttcaataaataaatgtcataaaactgacatttaatcatagaactatttattgtaaatttaaattctaaagtccattattttgtatcattacttctaaatatctcgcaagattcattatagtaattttaatcaattattaatagtggtaatgactagtttatcatcgtataataaataaaaacataagggggacctttcatatgaagaaactatatacatcttatggcacttatggatttttacatcagataaaaatcaataacccgacccatcaactattccaattttcagcatcagatacttcagttatttttgaagaaactgatggtgagactgttttaaaatcaccttcaatatatgaagttattaaagaaattggtgaattcagtgaacatcatttctattgtgcaatcttcattccatcaacagaagatcatgcatatcaacttgaaaagaaactgattagtgtagacgataatttcagaaactttggtggctttaaaagctatcgtttgttaagacctgctaaaggtacaacatacaaaatttatttcggatttgctgatcgacatgcatacgaagactttaagcaatctgatgcctttaatgaccatttttcaaaagacgcattaagtcattactttggttcaagcggacaacattcaagttattttgaaagatatctatacccaataaaagaatagattcgaagaaaacttccattggttatgctgttaacgtatagatgctaatgtaatctgaacgccgtatcatttggcgttcaacattacatgcacctttacaacatacatgccaatggaagttttttagtctcgtaataatgtttcctgatatttcaactttttaataatacttctaatcgttaataaacctacaatatagaaaatgagtacaacatagaataacgtcatatgttttataataaatgtcactgcaaacacagtacaaataacaaacattaatctatataaaaactgttcataccctttgattaccttctcttcaggtacaggccacacttgaggccataagccatatgcttgctgtgaataaaattgtgccatttgtaacaatataatatatacaaataaacacccaataattgctgtcactaatggatatgataaccaaaccattaataaaactgcaataattactaacctaaagataatattaaatgcgtctctccctcttataaagcttctaataaataagaataaatacatcgcattagagttaaatttactaccctttggaactggtaaaagtatatctagataacttcttctgactgcagattctttcaaatgttttacatcggtgaacatattaacaaatttataataattcatatgatgtcgatgttcgattgcaatcattttctcccaaggatacaaaaagcctggtttatattttttaactaaaaattctattaacacaggcaaagcaaccatcacaaatgcgatgtaccattttggagctaatagtaagtaatatgttagagcaaaggtgatgaatgatattaaattaacttgccatgttttaagtcccgattgataccattgccatcttaagcgtaaaccaacatatggaaaaattaatgcactgactccaaaacaaatataaaatgccacattatgttgattaatattgtaaaacaacgggaacattacaataacaataatgagttggattaatatgcgcgcaaagtaactatataaaatcgcatgacgcataaattgagacatgtgtttttcaaatggtaataaaaagattttatccgcttcttttaacagtggtcgcattggaaaaatagatgtcaacgcaacaatcactgctgctattaatgaaaaattgatattcgttggaatatgttttaaccattcaccatatccaaaaataaatgcacccagcaaaataagtaaaaagaccatgaaatgaccattaaatataaacttattataataatttttctctttacgaagggcatgtaatcttttattaaataatgtggtagcttggttacgcatgtacatctccaccttgcgtcacatgaatatatatatcgtctaatgtttgattatgtaagccagtttgttgtctcaatgcttctaaatctccaaatgcaacgacttcaccttcgtctagtatgataaaacgatcacagtaacgttcagctgttgctaaaatatgtgtactcattagaacggttctaccttcgtttttcttttcaaccattaaatctaacatggattgaattcctaatggatctaggccaaggaatggttcgtctataatatacaattcgggattaacgataaacgcacaaataatcatgactttttgtttcatccccttagaaaaatgactcggaaaaactttcaactcattttctaaacggaatgtctttaataatggcattgctcgattcatcgtttcatcacgatcaatatcatatgccattgctgtcatctcaatgtgttcctctaatgtgagttcttcataaataaccggtgattccggaatataagataactttcttctataagcctctatgtcatcattaatgttgatatctgaaattgatagagatccttccataggtgtaagcaatcctagcatatgtttaatcgttgtactcttaccagcgccattaaggccaataagtccaacaatttcgcctttgtttaattcaaaatttatatctttaattacagggcgttttccatatccacctgtaagctgttctactttaactgtcataaggcacctccatgacttatattgtaccaaaaattataaaatgctcatattaaatacacatgtcctaatatcgaatttttagcgacaatgttataatgaatggtaatactagttgaaaaggagtgtagtcatcatgtcagaaacaattttcggcaaaattttaactggagaaattcctagctttaaagtatatgaagacgattatgtctatgcctttttagatatatcacaagttactaaaggacatacgttattaattcctaaaaaagcttctgctaatatctttgaaactgatgaagaaacaatgaaacatatcggtgcagcattacctaaagtagcaaatgctattaagcgtgcatttaatcctgatggtttaaacattattcaaaataatggtgagtttgcagatcaatctgtatttcatattcatttccacttaattcctcgatacgaaaatgatattgatggatttggttataagtgggaaacacatgaagacattttagataacgatgcaaaacaacaaattgctgaacaaattcaagcacaattttaaatgtatgcttaatctaagctcgaacgggtataatatgattaatattataacaattgcgtttgaagtgataacatcaaggttagcaattttaaacaaaatgagttatcaagataacagatgttaaaagtgaggagaatataaatgaaagcatcacgcattctattcggtatcggtgttggcgtagcagctggttttgtagttgcacttcaaggacgtgacgacaaaagtgtcaagaacaacacgatcgatcgtactgcccctactggttcaaaatcagaactacaacgtgaatttgaaacgattaaacaaagttttaatgacattttaaactatggtgttcaaattaaaaacgaaagtgcggaatttggtagttcaattggtggtgaaattaagtcattacttggaaacttcaaatctgacattaatcctaatattgaacgtttacagtcacacatcgaaaatttacaaaatcgtggcgaggatattggaaacgaaatttctaagtagcaggttacgttctcgatcacaactatttttattagtaacagcatatttattttttaaaattaaatgccaaataaacgagatgacattagaaattagatatttcttgtcatctcttttttaaaactcaaatgaacttatgtttacaaattataggaagacattgtttgtagtgattttcgcttaaatcatatttatgaattgattgaaaacattgcttaggattcattgtgttatccttgcactttgattacgctttacttaaatcattatcgacaaacaacatacttatattttcattgagccgaaccttatatacacattacatataccttacttgcacaaattattaatctggtgtttattataattacatatcactatatttttagcatttgtataacttagttggtcaaaagatgcttttgcatatgccctgccatatccattttttatattattcaagttttcaaatactcatgtcacacgcgcctttttcataagtgatgctttattagcaagaatatgtgttcgcagaaatttgttctgcattctacttctacgctagtcaatcagacaattttaccaatccccactttcgcgtttcaaatcaaacaatacgtcgctcctttcttcttatataacaattcttctaacatgatatgttactattgaattactgaacctgagttagttataatctaacttatattgaaaagagatgaggcgtaagatatgtttttatgtaaaagacaaattgatatcaatgcacgatttggtttgcctagaattgcatttatgagtgcagttgcaaccatcattatgtttttagttagttatgaagtaatgtattttttatctaatacgccattatcagatagacattttctcatctttttattacttgtatttatgacgtatccattacataaaagtatacatttattatttttcttaccatatagaaaatcgtttaaagttcataagttaactaaaagaaaatggcttatattctataatacctacgtcaatcaacctgtacacaaattttatttttgcattaacttaatattgccgttaattatcttatctgcaatgttcgtttatctaacaatttcattcccgcaatatggacattattttatgttcttattggcattgaatttcggtatttccattacagatttattatatttaaaaataattatattttctaattatggacaatatatagaagaacatagtacaggtattaatattttgaaaaaaattaaaaatccatatcatttataacaaaataattatagcaaggtgttattatttgtttttaggctatgtaatagcttacaatcaaatgtatatagaccttgtttttttattttcatcaatttctacccctaaacctaatgctctagtctgatgtcatgggttattgattggtgataatataaaactatgttatattcacgatgattaacttacaaaggagtttcaactatgaagatgataaacaaattaatcgttccggtaacagctagtgctttattattaggcgcttgtggcgctagtgccacagactctaaagaaaatacattaatttcttctaaagctggagacgtaacagttgcagatacaatgaaaaaaatcggtaaagatcaaattgcaaatgcatcatttactgaaatgttaaataaaattttagctgataaatataaaaataaagttaatgataagaagattgacgaacaaattgaaaaaatgcaaaagcaatacggcggtaaagataaatttgaaaaggcccttcaacagcaaggtttaacagccgataaatataaagaaaatttacgtactgctgcttatcataaagaattactatcagataaaattaaaatctctgattctgaaattaaagaagacagcaagaaagcttcacacattttaattaaagttaaatctaagaaaagcgacaaagaaggcttagatgataaagaagcgaaacaaaaagctgaagaaattcaaaaagaagtttcaaaagatccaagtaaatttggtgaaatcgctaaaaaagaatcaatggatactggttcagctaaaaaagatggcgaattaggttatgttcttaaaggacaaactgataaagattttgaaaaagcactatttaagcttaaagatggtgaagtatcagaggttgttaaatcaagctttggatatcatattattaaagctgataaaccaacagactttaacagtgaaaaacaaagcctgaaagaaaaattagtcgatcagaaagtacaaaaaaatccaaaattattgattgatgcatacaaagatctattaaaagaatacgatgttgactttaaagatcgtgatattaaatcagttgtcgaagataaaatcttaaaccctgaaaaacttaaacaaggtggcgcacaaggcggacaatccggcatgagccaataacacaaaaccgagcgaccgtggttcaaaaatcataccacggccgctcggttttttcgcattaaaaatcggacagatgagctcatgtttcagtatactcatctgtccgatatcttttaattcttaatcgagtgattcaggattgtagaatctacgattttcaagaccaaatattttatctgtaaactgacccttgtcagtttttttatatgccttttcaaacatattcattctagcatcgatattatcgatatagcataaaatttctgcttcttttaagtatggcagttttggagaaccatactctaacttaccatgatgagataaaatcatatgtcttaacaacatgatttcttctccttcaatgttcaattcacgagctgcttcaactacttcatcactcgcaatcgagatgtgtcctaataagttaccttcgactgtatacgacgtcgcaacaggaccactcaattctctaactttaccaatatcatgcaaaataataccactatataacaaacttttgtttaacaatggataaatgtcacaaattgattttgcaatacgtaacatcgttaatacatgatagcttaagccactcgcaaagttatgatgatgagaactagcagctggatatgtgtaaaatcgttcttgatattttttcaataaatgacgtgtgatacgttgtaaattagcattttcaatatctagcaaataatgagaaatctcttcttgtatttctgccggtgataaaggtgcaccatctacaaattgttctgtttttaattgatcttcagttgtcgctagtctaatttggttgactttcatctgtttatttccgcgatagtttatgatgtcacctttaacatgtacaatttcttcaggcttgattgttgccatatcattttttgtagccgtccaaaatttcgcttcaatttcaccacttttatcttgcaaatgtaatgtcatataatctttaccttgtgctgttacaccctgtgtagctttatgcactaagaaaaagtgatcaactgaatctccgggatttagattctctatatttctcatcgtttcccgccttcctctattttgtttaatgtaatcacttcttttgatggaacaatattatcttttacacatgtaaagtatagtacttgatagtgttctgataatgatcgtaaataattcaacattttttcagtacgttttttatcaaaatgaacaaatgcatcatcaacaattaatgggaacggataatatggtcttagtaccttaattaaactgatacgtaaagctacataaagtaattcttttgtagattgacttagttcaacaggatcatataattgaccattaacatgtttaaccgtaattgaatcttcattatagttaatcatcgtatatctgccatctgttaaatgcttcaatatttctaccgcttcattaataacttgaggcaaacgtttatctttaatttgtttaatgtgttcatcaactaaactttgtaaataacttaaacttgcccaatcttttgcgatatcattaagttgatttttaagactgtgatattcatgtcttaaattagcaagcgttgtatcagtttccatgtgattgatttgtgcacttaaatcactgacttgtgcttgcatttcaagatattgctcattatattcgtcaacttgagtagccaataaatgatcttcttcttcaagttgtgcagttgttttttcacttaaactagaacttaattcataagaatagttttggttctcaagatatttagttaaatcattaaaacgactcaaattactagtataagtttggtaatcttcatgatgttggtaaaaatcttcttcagtaccaacattgataaaatcgaatagtgctgtaatttctttattattttcttctaattgagcatttaaatgatttaattcatttgtaacaagtttggtattttcagcattaatacgccatttttcattcgtgtcttcagctgatttcaaccattgttgcacatcgtggaataaagataatttgttgaaataaacaaattgtgattttgtaacagcttcagcatgattgtagaatgtatctaattcttgaaccaattgctggcgttgttgatttaaatcactgatatgttgatctaatgctttaatattcgccattgtagaaatactatcaacaattaaatcatttgaaattttagatgataagtataattcatccttaacgttctcaactgtcgattgtaattcatcatgacgccctttcgcatcatttaaacgaccttcaatatactgacgtttctcttctaaaatatctttatttttcaaagcttgttgccagtgatcacgaatgcgatattgctcatcaagatcaaaatctaagtcataattttcatctaaaatggctagttgtgctttaatttcttcgatttcatctgtgatggcctcgctataatctacttcttttgatttagacatgatgataccgataacaaatactaaagttaatactgcgaaaataataccaaacaacatgttgtttgaaataaatgagaaggcagttaaaccaatacctactaatgttaaaagaataaacgttgttcgtaacaatttttgacgtttttgtttttcttgttgctcaatttcgaaacgttctttcaatttgctatacaagttctctttttcgtttaattcaatgacttgttgtgagtattcttttttcttttcaaaagtctcttcaggaactattttttcttcaacagaatctagttcgctatgaaccgcattatcttcgattttattttcttctaaactacgttctaattgtttaatgtatgcagcttgttcttgtttattcttgatttgctcactgacataacttttcattgcctctgaactatctacgtcatgatgcgtttcagaccaaccaatatttgattgcaattcatctttatcacgttgtttattcgcaatatccttttcgattgcagtaagttcaaattctttatttttaatttcattttcttgttgattcaaactaatgaaggcgtcaatatcagattgtttaactggctctaattgagtcgcttcttctttaagttgagctaaacgctcatttcttaaaccaatatctctttctaacgattgcttatgcgctcgtgctttttcgtaacgatccacacctttttctgggaatgtgattggctcaatatttaactgttgttctagagacttccattcttgtgaatgatcatgtaaagcaacctctttttgtttttcttcatgcatttttgataattgatttaaattatgctttaaattctctaatcgacgtgatgatttatctcgatcatctactaagcgatgatatgtttctagctttgcttcttcttcacgaatttgactttctagttgttttaattgctcaatttgttgattaatgatcggatttttacctgattttttatataattcatcttttttacgattaatcacttcgcgcattgacgtgaattcagttgatcctaaagcccctgcttgtaataaataatcttgcaattgtttttcatttagatttctatgaatgtcttgaagccctagtacatcaaatgaaaagataccttgatatgtctttttagaaatataattaagtttcttttgtaaccaagcatcatcacgcacagcaccattaggtaaatatactttcacatcaccttgagcactgcctttaattcgttcaacttcaatctctaagccatcatcaagaataagtactaatttaccaccgtattggttacctagacgtggttctagtcttggctctttagactttttagttggaaatccaaataatatcgaatggatgaatgcttgaatcgtcgatttacccgcttcattttcaccaaaaatttcagtgaagtttttattaaattcaattttacgttgaacaaattgaccgtaaccataaatttcaagtgatttaattatcattttgttcacctctcatttcagcttttaatatttcttcagcacgattaactaatgctgtatggtcgaatgttccataatcgtctaggaacttagatgcccttggatttaaatataaatctgacatcgctttatcaaaaacagtttgatcgactaataattccgctgaaaattcattaactaaaggtgactcatcattttgtgcatattgtatttttaactcatcaatatatacaaattgattttcgttttcttcataatctgtaatcatttcttcaacttgtaataaatcttgaggtgaaattaatgtctcactattaataacaagcgttaaacgataaaaggcttttccttcttctctcacttgttctttaaagttttgaatgacctcgtataaaccttgcttagatgtcttatccgtttcaatagttgcttcttcaaatctaatatactgtgtaggataaaatttagtctttaattttaagtggtcaccctcgattaataagcaacctttttcaccttgctcattaaaatgtctaccttgaatattacctgaatagttaattacaggcatatcacttaattgttgacgttcatgtatatgacctaaagcccaataatgatacaatttactgtttaaatcttctaaaatgaactcggtatatctttcgttaactgaagatttactatacgtaccatgcaagacaccaatatgtatgcctttttggccttgacttgatggatattcatcaatcttgttctcataacttgctctattttcataactaaatccgtgaatataaattgtttcaccagatttagtaattgcttcatacgtctcaactttatttgaaaatacagaaacattatctggccagtttgatgaaatctttgatgataaaggatcgtgattaccatgacaaacataaacaaagatttgttcattttgtaaacgttcaaattgctgttttaagaaaatttcagcacgtaatgttctgttttcactatcaaataaatcacccgcgataattacaaaatcaacatcttgttgtaatgcaatatctacaatatttttaaaactttcataagcacttttttgaacatcctcaaaaattttagggcttatatgactcttagatttgaaaggactatctaaatgtaaatccgaacaatgaataaatttaaccatacatccatatctccttaattaaaggttctaacatcaattttgcaaaatccaactatacaaagcattctaatcactatattcatacttataggtgtagtgattcattagctgatttattaaaaccagtcgccatttttatttcgttaaaaaactattatctacacaataataaagtgctttagtcaaatcgtgatgttttatttattaacaagtttattatttcttcattttaccataatacgcttcatatcgtcgatgaacatatgaaattgagacacatttataacagtttaaaattttatttgtagcgtacgttgatatttttcaaaaatttcagtcggaaatgcaatttccgtagttattaacaccgctagtgaatcaaatggcacattaaagatttacatgattactctactagatttgctcggcagtaatgaccaattagaaactaaatgtcaaaactatcattgcacttaatacgccaaacattttcaggccgttcttaatgagtcattaaaagtgaaacgcttttccatcagtccgatacatgaccgaactaatagtattatgttgaaaactttacacttcaaaatgcaaaaaggaagttaggacacgtttactagcctaacttccgttactgaatgcatctgcccaatttgacagagagcctctaacttccgttatcaaaactaaaaaaactacccacaaagtctcggactctgtcggcagtctattcctctatttaaaggattgaaaaatattattttaatattagtcagcgtaaatttcgtctaatggtttaacgataatttggttgatttcttggaatacttgactcattttttgttcagcattcattaatgcagagatgttttcatctttttcaattgcttgcgcttgttcttgcgctttttgtaaatcttcttcagcaatttcttcaccttgcatttgtttttgttggaagttaatttgagtttcacggaactcgtcgaataactttttagattcttcgttagcttttacattagcgaatgcttctttgattgctttgtattcttcgctttctcttaaagcttgttctaattgatttgcataatcatataaatttactgccatggttatagcactcctttgttgtgatgtttattaaaacgttcgatattactttaccacatctcgcttttttagacaaagattgcaaccaaaccttggaaaaatccaataataccacctaaaatgaaacctaatgacataatcaactttagttctttgttagcaatttctataattaatttttcaatataatctaagtcaaacgtattaatttgttcttcaattaatcctcgtaaatccacttttttcataattgtagataagtgaatcgataatttttcaatgattaaatttgctaatttgctagagagttgaccttctaaataatcaacgaattgaggcattaacgtaaccactggcttattcgcttgtttgcttgcatatgttgttacatacactgatagattttcagcgatttcattaaactgcgatgcatctaacagttcattcaatggtttatctttaaaagtttgatattcattggtaattaacgatgtcacaattgttcttgctttaggatgagatgttaaacgtataagttcttgttgaatgcgatctgcaatactctcttttgtcataaacatttgcaacataccaattaacttacctttctcattgaaaaaagtatccaacatatcattaatatcttgtgtgccttttgcagatgataaataattccttgcacgatcacataataagtctgttgcgttatctacatgctgatttaaaaatgttacaagttgatttggcaataaagatgctattgtttggttttgatgctttgtataataattattcaattgtgattcaatatattgatttccattagtttgtaatacttgttctaaatcaatatcgatttgagaagtaatttgttttattgacaattgatctttcgtcaacttttgtaactgctgttgaatcatagattctattgcttgctgtgattgctcgcttttcaatttttcattaattaaagtttctgtaagcaaatgctcttcaatcacttggccaattttagttgcaatttcttcgcgtcttttcggtattaaacctggtgtaaatgggactctaaatttaaatatatagtatggtttaaaggggtgaaacagcattctaattgcaattacattagtaatgccaccaattatcgcccctactacaatcataaatatgataataaatagtgcattcataattttgactcctttgtgacaacatagttattcattataccactatttttattttttaattcattaatcatttcactttctgctcaatttattattagtttacatacaaaaagcgatgcctcacctctcgaaacaggtgtgttacatcgcttttattatttattaaaagtatataggcctagatatgtactaattcttctttagcatttctgttaaagtatgtttcagcttctctcattttagaagtaccgaaaattggttggttatctggatttaatacacgataaatattgcttactttgttactttgtaaaatgtacccattacgagtctcaatgttattccaataaatatcacttgttggtgcatggtttggatatgcacagtgatttcttgaaattgtttgaacgatttctaatggatcacagccaaatgtactgtttaatacttcagagtctctgaataatgcacaaattgaaatacaagttgtccagtttggtaatactctctctttttcgatttgtactaaagtctttttagaaagtccaattgtttgcgccatagtatcttgcgtataaccagcctctatacgaaccattttaaattttgtttgaattaaatctgtaaaactctgtctatccattctgttatctacctttctgtttggggaattttatccggacacaagaaattgcaataatacacatttcttgaaacacagattacatcttaatatatttttaataaaatgaaaagagtcaatttcacatttgtattaaattttgatcaagtcaacaagagttaagtttactttataatgaagcgaaagtaaatgaagtaaaattttatgcataatcactagatttgataaaacttacacttttataatgatatcaaatttacaaagaaaactgtataataaactctatcgctataaaaaattcatcaaaatcagattaaaaattgtctatttttcgacaaatatttaaaagctcattctaaatcaacttattttccattgcataaattgctgcttgtgtacgatcgctaacttgtaatttactaaatatatgactgacatgtgttttaattgttttttcagatacaaataaagtttctgcaatctctttatttgttttacctttaaccatttcacgtaacacttcaatttctctctttgacaacttattcgtgtagtgtggtttttggctaactgtttcgaatacatcttgtgccttaggatgtatcattttttcaccgttcataactcgtctaatagtttcaattaattgctgaggctcaacgtctttcatttcataaccatcagcacctttattgattgctgaaattacatgttcatcatcaacataacttgttaataccaaaactttaatatccggataatgtgccttaatatattccgtaatttcaataccattcatgccaggcatcactaaatctaatagcacaatatcagggtgctcatgctcttttaaatattctaaaaatgtttctccatctgcaaagtcttgtaaaacttctatgttttcaatcgtggataataaaaatcgcaatccttgtcgcacaatataatggtcatctactaatattactttgttcatgggttatctccttaaatcaagctattttataggaattgtgaattgtatttgtgtaccctttgttggctgagaatgaaaggtcactttacctcttaataatttaactctttgttttatgttattaataccgtgtgatgaagctatctgaacattatcgatctcaaatccttgaccataatcaatcacgtcaatatatagtatatcgttcatttgttttaatgtaagatccattttattcgtatcagcatgtttcttaacattattaatacactcttgtaatgctctgtatatgttttcttcgatttcattagataaatcgattaaaccttctacatttacatttaattgtatatgcattaatttactatatgctgtcaaagcatgaattaaaccttgctcaagtccaactggcttaagttgccaaatcaatgcacgcatttcattaacggcattttgactcgtttcctcaatcgtcttgaatgcttgtttagcgatggattcgtttgacatgccatacgcagcatgtgctgttagttttacagaaaataacatttgatttactgaatcatgtaaatctctagctaaacgattacgttcattaatttttgccgcttctttttcacggtctgttaaataaatacgtttgatggctgaccctaattgaaatgcgacagactctagcaactctaaatcttcatcgctatatatttcagtatttggagacgctacatttaaaatgccgaattgttcttgacccgatttaagtggtaccgttgcatgatgtgtaatattgtcattttggctaggaaatgctttagaggctaagttaatacgagaacaattgacgatattcgacgctttcattagcctacgttgattaaatgctttcacacaccaacaagacccatctttaatatagtgacagtggtctgctgtcaaagattgtggtagagccacatgtgatacaagttcatgttcacctacgctattgatgaaaaatatccagcctgtcgtgaaattactgccctcaattaaatattttaacgcaccttgggtcatgctatacatttcagtttcttcgtttaaaaattcggcaatctcttttaataaagctagtcgcgtcctttgttccatcaaatcgctccaattcatttttacgtgtattaactattatacattgagttattatatttttaaatcttagacgtaaacatgataaaatggccttgattactcaatagttatatttcggagaactgatttgtgatatgatattaaagactataggaggattttatgaaatttaaaataccagaaaactttaatgacttaagtttacgagatattttccaacaacttaaggtacctaaaaaagatttacatcatttaaatatgtctaaagatattactattaatgataaacctgcgcgattaatggataaagtgcatactggcgacgatgtatttgttccaaccatcgatgaaaaaagtaattatgttccaagttatcgttatgcacaaattaaatacgaagacgatgatatggcaatcgtaatgaaacctaaaggtgttaagactcaccctaatgatttaaaagaaagcaatactttaatgaatcatgtgatttacactattgatagtgactatgtcgaaccaattcatcgactggaccaggaaacagtaggattattaattgttgctaaaaatcctttaatgaaaaaaattcttgatcgcatgttagaagacaatgatattacgcggatatacaaagcaaatgttaaggcacttttacctttaaaaccacaaacgattgatatgccaattggtaaagataaattccattcgaataaacgatgtgtgtctcctactggacagcgtgcaattacacacattttaacttcaaaaatgataaaagaagctgtgtgccaacttgaaatcaagttggatactggacgtactcatcaaattcgtgtgcatttagctgaaattggtcaccctgttattggtgatcctttatatggtgattcaacgttaagacaattagaacttgaaagttacaaaatagagtttgtgcatcccttgactaaggaagtcatttccgtttctttggatgactaatttgattagttttgcatgatatttaaacatgcaataccgcattgtaactaaatcaagtatcaacttaaatcggatagatggaaaattattaattttttcagatgttcggttttttgttttttacgatgcttaggattttatattttgatattttagtaattattcattttataacatccttggataatgacttgtagtctttttcaactgcgttacgtgtatctatggacaatacatgacatcataagatttttatcacaggttgtttggccaatacatgtacaacaattcatcatataaaaaataggttctataataaaacggactccatgaaaagtttttccttttcatggctctatatcaaatcagacttataagttcaatttgacatagacaaaaaataaagcttgaacactacatctacctgtaatgcccaaactttattttatattaatatttaattaatgaggatctaccatatcttctggtttaatccatgcttcaaattgttcttctgtaacatatccagtttgaattgcagattcttttaaagttaaaccttctttatgggctttcttagcaatttgagctgctttttcataaccaatatgtggatttaatgcagtaactaacattaatgattgatttaaataattatcaatattctcttcgattggttcaatgcccactgcacaattgttattaaatgtttccataccatcagctaaaagataaattgattgtagtgtattatgcataataactggtttataaacattcaattcaaagttaccttgtgaacttgcgaagccaacaactgtatcattacccattacttggactgcaaccattgttaacatttcacattgtgtaggattaactttaccaggcataattgatgaacctggttcattttcagggatagaaatttctgccaaaccagctcgtggccctgaagccaaccatctcacatcattagcaattttcattaagtctcctgctaatgccttcaatgttccatgcaattgaacaacttcatcatgcgctgtaagtgcgtggaatttattttcagaagatacaaatggataacccgtattttctgaaatataatgtgccactttatcaccaaattcaggatgcgcattaataccagtaccaacagccgtaccaccgatggcaagatttaaaatgtgcttcttagattcagataacattgtttcacaacggtcaagcatataacgccagccactaatctcttgtcctagtttgatcggcgttgcatcttgtaaatgtgtacgaccaattttaataattgaatcaaatttatcttctttttctttcaaagtatttcttaaaagttttaatgcaggttctaattttgtttcaacctcttgatataatgcaacgtgcatagcagttgggaatgtatcattcgaactttgagatttatttacatcatcatttgggtggatactttcatcactttgatgatcttttaaatacatattagcaacataacttactacttcgttcacattcatattactttgtgtaccgcttcctgtttgccatacaactagtgggaagtgttcatctaattcacctgataaaatttgatcacatgcgtatacaatggcatctttctttgcctcgcttaattttcctaaatcaaaattagctattgctgctgcacgctttagttgtgcaaaaccataaactacttcgattggcatacgctctttaccaactgggaaattacgtttacttctttctgtttgagcaccccaatatttatctgcaggtacttctatttctccaaaagtatcatgttcaattcttactgacattcaatttctccccttatcactgtttatttaactgtagtatatcattaaataatttaattgagcaatttatgattaaaacgttttcataatttgaaataaaaatacactaatcgcacgtgttcaccctttattacagtgatacggtcatacgattagtgtgttatctatcattatttagttattattgaactaagtttaattacgatactttgttttagtagcttcaaccgtagcaatagctgtaagtatatataatacagcactaacaattgtcgtatatggatttagagcaacaagcgtacctaaaactcctgttaaactcgcataaaacccatcaagtgtataatacaatattgctgttattaataaacaacaaattacactgattacaatacctgattgattacttttaatgaatgtttgcgcattaacatcatcaattaatccttttgataaattgagttgtaattttattactttgaaaataacaggtaaatataatgccccaattgccaatggaaaagctttaattgatattaaacttataataactgttgctatcaataattgaatccagtattttcctaacataaatatataaatctcctctaatttcattcttcaatagcatatcataatcttggcatattaagaaacgcggtttaatgatttcattaaaaatattactgatagatgacttctttcaattatgtctggagtaattaattatcaattccgtttaaatggtgttttaatatttaaaattgaacttttgatatattactatgtctggtacacaaatcaatgttttatgctttacaaagttatattggcagtagttgactgcagtccacaacatagaggcttcggaatgtcagcttctatttcatgcaagttggtggagctccaacatagtggaattggattcccaatttctacagacattgcaaattggggaaacgggccacaaactcagaaactggtggaaagtcagcttaaaataacatgcaagttggcgaggccccaaaatagtgagatcggatttctaatttctacagacattgcaaattagggaaacgggccacaaactcagaagttggtggaaagtcagcttaaaataacatgcaagttggcggggccacaacatagaaaaattggatcctcaatttctacaaacaatgtaagttggggaaacagccccaacactgaaactagcagaaagtcagcttctatgaatataataaaaaagctaggtaacaaaatgctacctaacttcatattcaagataatcaatcctatttgatatatgttctatactatacattatttacatgataaataactgaatattacacaattataatactttactgactgtcttcttcagaattcttttcttgatcattttgatcagagatttgttccatttctttacctaattcttttaaatcttcaaaatccgttaccatactgttttcttcttcatgataatttaattttggatctttgtctttagacataatcaatacctcacagatttttaattaagcaaagcgtgacgtaaagtaagctttaacatcttcaggtaaacctgcagccgcttctttatcaagaataacatttaccattctatgtgcttttaaatcggctggttcgaagcttgttttaccattttcttgatataatttttcaactacatctcgtttattagcacctgtcactactaagaaaatttctcttgcttccattagtccttgacgaatactaacatttaacttaccttgctcatcgatagaaacaacttgtaatgttaatttccctttattttctttagttttaatcttatcagcgattaattcgattgcatctttttcataagcaattggataaacttgacctgctggtacacctaacgcttcgaaatatgattttttatcgtcataatctaaaatatttatttggctaaaatcaacagcatgtttttcaacatttttctttaattcatctagaactggcgcttgatctgtatctaaatgaaaacctgcaattgtagtaggattattgttaaattgctttctaataatatcagcagcatattctgctacaagttgactattgtcaaagactttaaagttcattgccatgatttctacactcctcttagtttgcattttacataaaaacggcgatattaataattattataccctaactttcaatatatcaaaccatttaactttaacatgcttatactctaaatatagcacttaagcatcatttttataatgaaaatgagtaaattttaattcaatcccggaaaatcttgttgacgtaacgcttcataaattaacaacgcagcagtatttgataaatttaatgaacgaatatgttcactcataggaattcttaacgctgtgtcttgatatttctctttcacccagtctggtaatcctgtcgtttcttttccaaaaatgaagtaaaaatcttcgtcatgatttgaaaaatcaaaatcactataagtctttttaccaaattttgttaataagtaatactcgccatttgtgacttcaaaaaatgcttcaatactatcatgatacgtaatattcacaaattcccaataatctaaaccggctctttttaacattttatcatcagttctaaatccaagaggtttaattaaatgtaaatgtgtgtttgtacctgcacacgtacgtgcaatgttaccagtattagctgggatttctggttgatataaaacgatatgatttgtcatattactattctctccttgtgtctaatccttttatcatttcattctgaacttctgcatcctcttgatcataattagcattgataaaatctcttgcttcttccccaagaatttgaccaatggcccaataagcagttgctcgaatcaacggtctttcatctgttgttgcaacttttttcaattctggaattgcatccacttcattaaaatgcgccaatgctaaaatagcatttcgttgtatcggctttttaccacgccaagcacctgcaaggtgaccatatgtttgtttgaattctttattagacatacgtagtaaaggtactaatcttggctttaaaatttctggttccaaaatgatgtcatcttgttcggtattaatacctctatttttcggacaaacttgttgacacgtatcgcaaccatataatctattcccaattttataacgatattggtcaggcatatagccttttgtttgcgttaaaaaactaatgcatttctgactatttaattggccatttccaactaatgcacttgttggacaacgatcaacacaaattgtacaatcaccacagctatctaataatggatcatcaggttcaaaaggtatactgactaacatttcaccgaggtatgtccatgttcctagtttaggattgatgacaaagccattacgaccaacaaatcctaaacctgcacgttctgctactgccctatctgataatacacccgtatctaccatagatttgatttcaacatctggaactttagattcaataaatgcagctaacatgtctaatcgtttacgcataattgtatgataatcttgatcccacgatgctctagcaaataagcctctgcgatcacctctaacactcttaggtgcacctttcagtttgttaggataaccaactgcaattgctatgattgaccttgctgttggtaaggataatttaggctccgttcgtaaagcaatatcagattcttcaaatcctgaggcataaccatttgcatgatatgcttctagcttttgcttcaattcatcaaagggatcggcagtagtaaatccaatactgtcgataccaattgtatatgcatagtcaatgatatcttgctttaattgctttgtatccaatcgtatgccccccataaaataatactatgttattttaacacaaccattattcatattgaggtttcatttcacataattttaataataaaaagcttgaatatatgatataactttgtggtgcgtatcatatattcaagcttcgttaggttgttataatactcttgctaagaaattttgtgttctttcatgttgcggttgttcaaatatttcgactggtgtgcctgactctacgacaacgccatctgccataaatatgactttgtcacttacatctttggcaaatcccatttcatgtgtcacaaccaccatggtcataccttctttggctaggtctttcattacttttaatacatcaccaactacctcaggatctaatgctgaagttggttcatcgaataaaataacatctggatgcattgctaaagctcttgcaattgctaccctttgtttttgaccacctgataattgattcggatatacatctgctttttcttttaatcccactttatctaataacgacaatgcttccttatgtaattcatcgttattatctttctttaataatttaggagctaaaataatattatcgacaacttttttatgtggaaataggttgaagttttgaaataccatacccattttttgacgtagtttatctacttgtgtccctttttccgttaagtcattgccttcaaaaatcacttgacctttagtaggtacttctaataaattcatacatcttaacaatgtacttttaccactaccagatggacctattattgctactacttccccttgattgatttcaagattgatatcttttaaaacttcattatctccaaaaactttattaagattgtttattttaatcactggcattcaatctcccttcaatcatgttcataatgcgtgtaagtacaaatgttaagacaaagtataatgctgctgccactattaatggtgtgaatgggtcaaatgaaataccttgaaccacttgtgcattaaacataatttcgccaactccaattgttgacacaatagatgattctttaattaaagtgacaaattcattacctaaagctggtaaaatatttttaattgcttgtggcataattacacttttcatcgtttgtctataattcaaacctagactacgtgcggcttccatttggcctttatcaacagcatttatacctgcacgaataatttcagcaatgtaagctgaggaattaataactaatgcaattgttccacaaacaagagctgaaatgtctagtcctaatgcagcagttataccaaagaatacgataaatacttgaactaacattggtgttcctcttaatatttcgatatagatagaagcaatccatgaaataatttttattttacttaatttcattaacgcaacgaatgcacctaaaatagaacctaatgcaacaccgataagtgaaattaatattgtaatcttaattcctttcaagaaaaaactaccatacttagaaataaaaccactgtcatcattcatcgcatttgcagcattagtcatatatttatcgattaatcctttatctttaacctccttaatcgttttattaatttgtgacaataattttggtgaatcttttggcactgctatcactgtatctttttcttcttcattaaatttcacattggaaattcctaatttaggattttgttttaaatatgcttctgctacaggtttttcaactacagcaccttcaacctttccacttttcaatgctaatataacgtctggtaaacggcttaatgaagtaatagatgcattttcaatttcggtttgagcgattttttcttgttcagttcccttttgtgcccctacttttttattattaaagtctttgatatctttatattcattaactttatctttctttacaagcatgatatttttagtcatcatatatgaatctgaaaaatcaacttgcttcttacgttcaggcgttgaagtcattccggaaataataatatcaatttttccagttttaagagctcctaacaaactatcaaatgacatattgacgatttttaattttaaattattatctttcgcaatttttttagctaaatcaatatctacacctgcatactcagtcttaccattaactgtatgctcaaattccattggtgcataatctgcagaaagacccactctaagttcaccgcgttctttaatcttctcccatgtttgatcttgttcagcatgtgctgtgggattgatatacaccatagcactgctaattaacaaccctaatactaatataaacctaattaaacacttcatttatacagccctccctaattaatattcataattatacatattaatacattttgatgcaatagtgttttataaatgtatttttatcaatataaagaaaagcttctttttaaaagactgtacataaaaaatccgctattatacgtgaacaaatctcacattttaaaatcaatcaaaaaagcgctactatcaatatcttattgacagtaacgcctatatttatcatatattaaaacttattcttgtcatcaagctataaattattgttttggaacttcaaatttataaatatcattagaatatataggaatgaattttttacacaattcatgaacaataaatgccgatacaaatggtatgacaaaataaccaagtgctaataaaataatattcattgttggatcacctgacattcggttaaatgcatttattgggccaactaatcctgtatatccaaatccagcagacaatggtgttcctttaacctgaagaacgtaagcaatgattccagtaattattccatttatagtcaatggtatcgaaataattaaatttttcaagtaaactgggatcatcatttttgcagctcctatgagtaaaactgcatttacaccaatagaattgacacgcaatgagccaaataagaaagtaacacaggcagccactatacctaggtttgctgctccacttcctagtccgtttaaactaatcgcagttgcaatcgctactaacgatattggtgttaccattaataatgaaaatgccacactaataagtatagacattaacaacggatttaagtctgtaaaagaatgaattacatttccaattgcttgagtaatttttcgaatgtaaggtaatgtgattagaccgatacccccactaacgataggtactaaaactggtaatataattaattcaaaagatccaagtttgttttgtaataccatatatataagacatgcaataataacaaccaaactcgtatttataatgtcacctataccttttaacataaaactattattgctatatacaacagcacctgaaccaatcatagctgatgtacctactatagcagcacctgcaccattaaatttaaattgatgagcagctaaaaccccaataataaatgccataaatgattgaattagtatcactaactgatacgttaattctaaaatttcattaccacttttaaatatttttaatacttcacctaataaagcattcggaacaagtgcaataacaacaccagcaccaatagaatttaaaatcttactgaaaaactgtttattatcagcattatttgcgttactcataaacgacctccaatttgaacattaaactcatcatattatagaaaattaactttaacaatgattagttggctaatttaatctaaatataacaatccacaaattgaataaagcaaatttaaacaatctactcactaatcaatgtcatgttaattttaaaatactactaattacatcctgtgactaataatgtaataaattgtaaatattaaaatagccatattactattaagatagataaattgaatcgacttggtataaagcacaataaaatagcacttttacaaatatattattagaaaagttgaaacaaatatataaccccagataatataatcattatcattaatgtaataccaaaaaaagaagttaaacaggttcttcatcttttatggtgggaaggtaaaacttcctgctttttttaatacacaaaaagcgcaattgcctctataatttaaagtgaccaaacccaaactaaaggagacaagtgcgcctatgtgtaatgataccttagaattactaagaataaaagatgaaaatataaaatatataaaccaagaaattgacgtcattatcaaaggaaaaaagcaacagtggttaatgctgtactaacgtataagccttcggcctgttattgttgtggagttaaaaatgaaggacaaattcataaacatggtaagcgtgtttctcgtattactttacttaaaactcaagggtataacacatacctcaacttagctaaacaacgttttaaatgcttagaatgcaatggcacttttactgctaaaacgtcaattgttgatgagtcgtgttttatctcaagatgtgttactcaaaaagttatagaagaagctactaaagttaaaacagagattgatactgcagaagataactgtatctctccatctactgtaagtcgtattagaactaaagcggctaattcattacgaattaaaccctttaattgtttgccagaacacatcgctatggatgaatttaaaagcgttaaaaatgtaactggatcaatgagtttcatttttatagataatgatactcatgatgttatagatattttagaaaatagaactacaagattcttgcgtgcctatttcgagcgattcgatttaaaaaatcgacaacaagttaagacggttactattgacatgtatgaaccctatgtccgattatttcgcgacctatttcctaatgcagctattatttttgacagattccatatcgttcaacatttaaatagagaacttaataagtatcgtgtacaagttatgaatgaataccgtaataaaaaaggacctgattatacaatttttaagaataactggaaagtcctattgatggatactagtaaaaccatatttagtaaatacagatggaataaatcttttaaggcttataaacgctcacctgacattgtagaattcatgctttcaaaagacgatatactacgacactcctacgaacttgtccaaggattacgaaaagacctaaggttatgtaattggcctaaatttattaatcgtttaaattcagttagtaaaaagtctgtgagtaagggtgtatggaaagcggttaaatattatagaaaacatcaaaggatgttaagaaatacaatttattacccagcatttaataatggtgctatagaaggaattaataataagataaaattaatcaagcgaatttcttttggttacagaaatttcaacaactttaaagcacgtataatgatgattttcagcttgtacaaaggagaaaaaagaagacaaccaagcccaataatggactggccgcctaataataaaaactctaaaagttgtattttaaaaatagttctttaaattatatacccaccacatttggtggagaaccaaaagaaaccttgttttacaaggtttctaatacgttatgttatgtaaataacagttaattataccggtggtcggggtcgaaccgacactccacaagtggaacgggattttgagtcccgcgcgtctgccaattccgccacaccggcttaatggtaaacaaaaaacttccctttggaagcaattatggagcggaagataggatttacacctatacctcgttccgggaaggaacgtgttctaaaagttgaactactcccgcaaatattaaattatggagcggaagataggatttacacctatacctcattccaggaaggaatgtattctaagagttgaaatactcccgcattattattaaattatggagcggaagataggatttgcacctatacctcgttccgggaaggaacgtgttctaaaagttgaactactcccgcataaacctggaggcggcaaccggatttgaaccggtgataaaggttttgcagacctctgccttaccacttggctatgccgccaataactgggctagctggattcgaaccaacgagtgacggagtcaaagtccgttgccttaccgcttggctatagcccattaataataagggcggctgaaggggatcgaaccctcgaatgtcggaaccacaatccgatgtgttaaccacttcaccacagccgccatggcaggggcagtaggaatcgaacccacaccaaaggttttggagacctctattctaccgttgaactatgcccctattaaaaataataaatggaggggggcagattcgaactgccgaacccgaaggagcggatttacagtccgccgcgtttagccacttcgctacccctccataaatggtgccggccagaggacttgaacccccaacctactgattacaagtcagttgctctaccaattgagctaggccggctaagaaatggttcaggacagagtcgaactgccgacacatggagcttcaatccattgctctaccaactgagctactgaaccataataaaaatgtaatgatggcggtctcgacgggaatcgaacccgcgatctcctgcgtgacaggcaggcgtgttaaccgctacactacgagacctataaaatattgcgggaggcggatttgaaccaccgaccttcgggttatgagcccgacgagctaccgaactgctccatcccgcgataataaaaaataatggcggaggaagagggattcgaacccccgcggcccgttaaggccctgtcggttttcaagaccgatcccttcagccggacttgggtattcctccattattataggtaaatcgctattaattataaaattaaatggcggtctcgacgggaatcgaacccgcgatctcctgcgtgacaggcaggcgtgttaaccgctacactacgagacctataaaatattgcgggaggcggatttgaaccaccgaccttcgggttatgagcccgacgagctaccgaactgctccatcccgcgataataaaaaataatggcggaggaagagggattcgaacccccgcgagccgttaagcccctgtcggttttcaagaccgatcccttcagccggacttgggtattcctccaaaattatatggaccttgcaggactcgaacctgcgaccgaacggttatgagccgttagctctaaccaactgagctaaaggtcctaaatataattttacaactaataaatagtggcggtggaggggatcgaacccccgacctcacgggtatgaaccgtacgctctagccagctgagctacaccgccttatatagtttgtaaataatatggtggagactagcgggatcgaaccgctgacctcctgcgtgcaaagcaggcgctctcccagctgagctaagcccccataataattacagtatatcgggaagacaggattcgaacctgcgaccccttggtcccaaaccaagtgctctaccaagctgagctacttcccgtataattaacgcgcccgataggagtcgaacccataacctcttgatccgtagtcaaacgctctatccaattgagctacgggcgcatatgtttttattgaaaatggtgccgaggaccggaatcgaaccggtacggtgatcactcaccgcaggattttaagtcctgtgcgtctgccagttccgccaccccggcactataaaaatggagcagaagacgggattcgaacccgcgaccccaaccttggcaaggttgtattctaccgctgaactacttctgcatatgcgggtgaagggagtcgaacccccacgccgtaaggcgctagatcctaagtctagtgcgtctgccaattccgccacacccgcaaatggtgagccatagaggattcgaacctctgaccctctgattaaaagtcagatgctctaccaactgagctaatggctcttccatggtgccggccagaggacttgaacccccaacctactgattacaagtcagttgctctaccaattgagctaggccggcaatatgtaagaataaatggtggagaatgacgggttcgaaccgccgaccctctgcttgtaaggcagatgctctcccagctgagctaattctccgatttaaaactgcctggcaacgttctactctagcggaacgtaagttcgactaccatcgacgctaaggagcttaacttctgtgttcggcatgggaacaggtgtgacctccttgctatagtcaccagacatatgaatgtaatttatacattcaaaactagatagtaagtaaaagtgattttgcttcgcaaaacatttattttgattaagtcttcgatcgattagtattcgtcagctccacatgtcaccatgcttccacctcgaacctattaacctcatcatctttgagggatcttataaccgaagttgggaaatctcatcttgaggggggcttcatgcttagatgctttcagcacttatcccgtccacacatagctacccagctatgccgttggcacgacaactggtacaccagaggtatgtccatcccggtcctctcgtactaaggacagctcctctcaaatttcctacgcccacgacggatagggaccgaactgtctcacgacgttctgaacccagctcgcgtaccgctttaatgggcgaacagcccaacccttgggaccgactacagccccaggatgcgatgagccgacatcgaggtgccaaacctccccgtcgatgtgaactcttgggggagataagcctgttatccccggggtagcttttatccgttgagcgatggcccttccatgcggaaccaccggatcactaagtccgtctttcgaccctgctcgacttgtaggtctcgcagtcaagctcccttatgcctttacactctatgaatgatttccaaccattctgagggaacctttgagcgcctccgttaccttttaggaggcgaccgccccagtcaaactgcccgcctgacactgtctcccaccacgataagtggtgcgggttagaaagccaacacagctagggtagtatcccaccagcgcctccacgtaagctagcgctcacgtttcaaaggctcctacctatcctgtacaagctgtgccgaatttcaatatcaggctacagtaaagctccacggggtctttccgtcctgtcgcgggtaacctgcatcttcacaggtactatgatttcaccgagtctctcgttgagacagtgcccaaatcgttacgcctttcgtgcgggtcggaacttacccgacaaggaatttcgctaccttaggaccgttatagttacggccgccgtttactggggcttcgattcgtagcttcgcagaagctaaccactcctcttaaccttccagcaccgggcaggcgtcagcccctatacatcaccttacggtttagcagagacctgtgtttttgataaacagtcgcttgggcctattcactgcggctcttctgggcgttaaccctaaagagcaccccttctcccgaagttacggggtcattttgccgagttccttaacgagagttcgctcgctcaccttagaattctcatcttgactacctgtgtcggtttgcggtacgggcacctattttctatctagaggcttttctcggcagtgtgaaatcaacgactcgaagacacaatgtcttctccccatcacagctcagccttaacgagtaccggatttgcctaatactcagccttactgcttagacgtgcaatccaatcgcacgcttcgcctatcctactgcgtccccccatcgattaaaacgattataggtggtacaggaatatcaacctgttatccatcgcctacgcctgtcggcctcagcttaggacccgactaacccagagcggacgagccttcctctggaaaccttagtcaatcggtggacgggattctcacccgtctttcgctactcacaccggcattctcacttctaagcgctccacatgtccttacgatcatgcttcaacgcccttagaacgctctcctaccattgtccaaaggacaatccacagcttcggtaatatgtttagccccggtacattttcggcgcagtgtcactcgactagtgagctattacgcactctttaaatgatggctgcttctaagccaacatcctagttgtctgggcaacgccacatccttttccacttaacatatattttgggaccttagctggtggtctgggctgtttccctttcgaacacggaccttatcacccatgttctgactcccaagttaaattaattggcattcggagtttgtctgaattcggtaacccgagaggggcccctcgtccaaacagtgctctacctccaataatcatcacttgaggctagccctaaagctatttcggagagaaccagctatctccaggttcgattggaatttctccgctaccctcagttcatccgctcacttttcaacgtaagtcggttcggtcctccattcagtgttacctgaacttcaacctgaccaagggtagatcacctggtttcgggtctacgaccaaatactaaacgccctattcagactcgctttcgctacggctccacatttactgcttaaccttgcatcaaatcgtaactcgccggttcattctacaaaaggcacgccatcacccattaacgggctctgactacttgtaagcacacggtttcaggttctatttcactccccttccggggtgcttttcacctttccctcacggtactggttcactatcggtcactagagagtatttagccttaggagatggtcctcccagattccgacggaatttcacgtgctccgtcgtactcaggatccactcaagagagacaacattttcgactacaggattattaccttctttgattcatctttccagatgattcgtctaatgtcgtcctttgtaactccgtatagagtgtcctacaaccccaacaagcaagcttgttggtttgggctcttcccgtttcgctcgccgctactaagggaatcgaattttctttctcttcctccgggtactaagatgtttcagttctccgggtgtgccttctgatatgctatgtattcacatatcgataacatgacataactcatgctgggtttccccattcggaaatctctggatcaaagcttacttacagctccccaaagcatatcgtcgttagtaacgtccttcatcggcttctagtgccaaggcatccaccgtgcgcccttaataacttaatctatgtttccaccatttttataagtcaaacgttaacatgaagttacgttcttttataaaaagatttaaacgcgttattaatcttgtgagtgttctttcgaacactagcgattatttcttatgaattcaagcttatttaaaactctttattcactcggttttgcttggtaaaatctatattttacttacttatctagttttcaatgtacaaataatggtggagactagcgggatcgaaccgctgacctcctgcgtgcaaagcaggcgctctcccagctgagctaagcccccaaataggtattaaattaatggtgggcctaagtggactcgaaccaccgacctcacgcttatcaggcgtgcgctctaaccagctgagctataggcccattaatttgaatgaacaaacattcaaaactgaatacaatatgtcacgttattccgcatcttctgaagaagatgttccgaatatatccttagaaaggaggtgatccagccgcaccttccgatacggctaccttgttacgacttcaccccaatcatttgtcccaccttcgacggctagctcctaaaaggttactccaccggcttcgggtgttacaaactctcgtggtgtgacgggcggtgtgtacaagacccgggaacgtattcaccgtagcatgctgatctacgattactagcgattccagcttcatgtagtcgagttgcagactacaatccgaactgagaacaactttatgggatttgcttgacctcgcggtttcgctgccctttgtattgtccattgtagcacgtgtgtagcccaaatcataaggggcatgatgatttgacgtcatccccaccttcctccggtttgtcaccggcagtcaacttagagtgcccaacttaatgatggcaactaagcttaagggttgcgctcgttgcgggacttaacccaacatctcacgacacgagctgacgacaaccatgcaccacctgtcactttgtcccccgaaggggaaggctctatctctagagttgtcaaaggatgtcaagatttggtaaggttcttcgcgttgcttcgaattaaaccacatgctccaccgcttgtgcgggtccccgtcaattcctttgagtttcaaccttgcggtcgtactccccaggcggagtgcttaatgcgttagctgcagcactaaggggcggaaaccccctaacacttagcactcatcgtttacggcgtggactaccagggtatctaatcctgtttgatccccacgctttcgcacatcagcgtcagttacagaccagaaagtcgccttcgccactggtgttcctccatatctctgcgcatttcaccgctacacatggaattccactttcctcttctgcactcaagttttccagtttccaatgaccctccacggttgagccgtgggctttcacatcagacttaaaaaaccgcctacgcgcgctttacgcccaataattccggataacgcttgccacctacgtattaccgcggctgctggcacgtagttagccgtggctttctgattaggtaccgtcaagatgtgcacagttacttacacatatgttcttccctaataacagagttttacgatccgaagaccttcatcactcacgcggcgttgctccgtcaggctttcgcccattgcggaagattccctactgctgcctcccgtaggagtctggaccgtgtctcagttccagtgtggccgatcaccctctcaggtcggctatgcatcgttgccttggtaagccgttaccttaccaactagctaatgcagcgcggatccatctataagtgacagcaagaccgtctttcacttttgaaccatgtggttcaaaatattatccggtattagctccggtttcccgaagttatcccagtcttataggtaggttatccacgtgttactcacccgtccgccgctaacatcagagaagcaagcttctcgtccgttcgctcgacttgcatgtattaggcacgccgccagcgttcatcctgagccaggatcaaactctccataaaaattatgatgtttgattagctcataaatactaaataatgtttgtaacttatagttacgtttttggaattaacgttgacatattgtcattcagttttcaatgttcgtttgtcacttacaagatttaattataactcgtaagtttttgtaagtcaagaattatttttaattattttatttctaaaaaataaatttcctaactcaattaattcaacaaatattattttattatgtatttgttcgaatttcaatagtcaaatttacactttattaatattttaaatcaacaacttaaaacatttgttttttaaatattagtgccgtttgacgacttttatataatatcaagttattctagtagagtcaacataaaacaacacttatttttgtttaaaaattactgttgaagggattattttctattcgtaagtactatatgtatttaaagtgtaattccttatgctttttacttcagttttacaaacaaacttatactcactttatggatagttatttagtagaccttcgtttgaatatttttatgtttatttataaaggatactagttattagttaataccacttccgtagttagaatattcttttcttcaatttaaatatttttcagaataagcataaaaaaaagttaaacaactttcatgtcgtttaacttcttaaatattacgcttacttatatgaagtaagctaacgcttttttaatttgtcatactaccaaagttaaattatttatcttggcattctttacaaactccataaatttccattcgatgatgtgttacgtcaaagtcagtcatatgctgagctaatctttcaatttcatttaactgtggatattgaaaatcaacaatcttaccacattgttcacatataatatgataatgattatgtgtattaaagtcgaatcgacttgatgagtctccatatgttaattcttttacaattccaatatctttaaacactcttaagttattatatattgtcgcaacacttatatttggaaaatcaggtgaaagtgcttgataaatttcatcagctgttggatgagtatgtgaagaaattaaataacgtaatattgcttgtctttgaggtgtaattcttacgcctgcttgtcgcaatgatgcaattgattcttctagttcatgttcaattgattctatttcaacactcatctatatcaccatctttcttatataataattattattacttactataaatataactgtagtattgcgcgcgtgtcaatatttacatgatgatttcatttaatagccttttttagcatcaacttcattctcaattagaccattcttattgagaaaattaactagattgtttttaaaaatatctaataagtcatactttgcttcataatcattaccagttatatgcgctgttatagttacattatccaattcatataattcatgattaggtttcaaaggttcattttcaaacacatctaaatatgcatgtcgaataactttactttttaatacttctattaagagcgcttctttaactatgctacctcgtcctatatttataaaaagtgcttcatctttcattaattcaaaatgttttttctttagtaaatgaatcgtttcttgcgtttctggtaaagcatttataataatgtcagcatttggtaatgtgctttcaagtgattcgatagtatatatctcgtcaaactcatctttgttctgacctgacttgctcagaccaattaaattcatattaaaagcctttgctaacttcgcagttctagtagcaattgcacctgtacctaaaaataaaactgtttgtcctgataggcgtttaccagttattttcgaatcatatatatgttgtcgttggttatcatatgatagtttcatctttttataatcatctaaaatgaaagctaaaatgtattcagataattgtttagcttgaacaccttttccattagttaaaagtatgccgtgatctgcaatataatctaacggcaatgtatttacacccgttgcaaaccatgcaatccattttaaattcgggcaacgtcgtaaaaatgcctcattgataccgccatcataaccaactaatatatctaaatcagccaagtcgctctcaggtatttctgatgcttttttataaaatttaaaatctaaatctgaaaagcgttgttgtaattcagtttcaacttcacgcatacgatttaacccaacaactttcatatatgtcaccccaaaatgtttttaagttcttctatttgtgttttaaccttaaccttctcgataacatctaatactttaccttgttcatctattataaaagtcgttcttacaatgcccatactttctttgccaaatgatttttttaactgatatacgccagtttctttagctaatttaaaatcttcatctactaataaatcgaaattcaatccgtgtttctcaataaaattttggtgttttttctttgaatcaccgcttataccatatactgcaacatctaaatcattgaacatttctaaattgtctctaaagtcacaagcttctgtggtacaagtaggtgtattatctctaggataaaaatatataatcgcctttttaccttttaatgtatcatttgtaatgacagttccgtcttgattttctaatttaaatattggaaattgttctcctttttgcaacatataatcacctttttcttcattataataattttatgatacgatattagatgaaaatattaaattaaaagaggttgatataaatgaattttagtgaaagtgaacgtttacaacaactttcaaacgaatatattctaggcggtgtcaattccccttctcgttcttataaagctgtaggaggcggtgcacctgttgttatgaaagaaggacacggtgcatatttatatgatgtcgatggcaataaatttattgattaccttcaagcatacggtccaattattacggggcatgcacatcctcatattactaaagcaattcaagaacaagctgctaaaggtgttttatttggtacaccgactgaattagaaattgaattcagcaaaaaattacgtgatgcaattccatctcttgagaaaattcgctttgtaaattctggaacagaagcagtcatgacaacaattcgtgttgcacgtgcatatactaaaagaaataaaattataaaatttgctggatcttatcatggccattctgatttagtattggttgcagcaggtagcggcccatctcagctcggttctccagactcagctggtgttccagaaagcgtcgcacgtgaagtcattactgtacctttcaatgatattaacgcctataaagaagcaattgaattttggggtgatgaaattgccgcagtattagtagaaccaattgttggtaactttggaatggtaatgcctcaacctggatttttagaagaggttaatgaaatttcacataacaatgggaccctagtgatttatgatgaagtaattactgcattccgtttccattacggtgccgctcaagatttattaggtgttatccctgatttaactgcatttggtaaaattgttggcggtggtttaccaattggaggctatggtggacgtcaagatattatggaacaagtagcacctctaggacctgcatatcaagctggtacaatggctggtaacccgttatctatgaaagcaggtattgcattactcgaagtactagaacaagacggtgtttatgaaaaattagacagcttaggccaacaactagaagaaggtttacttaaattaatcgaaaaacataatatcacagctacaattaatcgtatttatggatctttaacattgtactttacagatgaaaaagtcacacattatgatcaagttgaacattctgacggcgaagcgttcggtaaatttttcaaattaatgttaaatcaaggtatcaatttagcaccttctaagtttgaagcttggttcttaacaactgaacatacagaagaagatattaaacaaactttaaaagctgcagactatgcttttagtcaaatgaaataacttttaaggaagtatatttttaattgaattaaaataaagcaaatgctcacatagtagattcattttatatcgttaactattaacgtttaacttgatatgtcactatgtgagtttttattttacaaatttatactattttaatctctgactaaagttttacatcgctatcagtattatgtatgatttattttaacaactataaataagcttgaattttgtaactagtaagtgtataacagtaatgaatacgaatattagatattcaataaacttaaaaggggcgtcattatttttgagactaggagctcggatttttaaaactggtatagccattattttagctatgtctatcgcttctttactaccggatgatgttggtctgaaagccttagctggtgtcagtgctgttgttgcaatgcaacctagtatttatcgttcatttaaaacagtttctgatcaagcattgggtaacattataggtgccatactatctgttacaatggtaacaatttttagtgataattttatcattatgggtgttaccgtcatagtacttattgctattttatttaaatttaatttagcacatgttgctactttggcgagtgtaacagcattaatcattatgggacaacataccggttctttctatattaccgccttttacaggtttgtacttgtaatgattggtgtcataagttcatctctagttaactttgtgtttctaccacctaaatttgaaacaaaaatttactataattcattaaatatatcctcagatatttttatgtggtttaaattagtattaaatgatacgacggagtttaataatattaaacaagatagtcataatttaaaacaacgtgtcgaaaagttagagaaaatttatgattactatagcgaagaacgtcctattacaaaaaaacatattcaccaacagaatagaaagaaaatacttttcagagaagtagttcagacgactagacaagcttatgaagtattaaacaaattgtcgcgttatcaaaacgacttatatttacttaataacaatttcctattacaaatcaaattagatttagattcattaactgcttttcacgagcaaattttagctagcctttctaaaaaagcacgttataatgtgacacatgttgattatgagttagataatccgcagaaaaaagatttattgtccacatttcagcatgagttaataaatcatccttatcaaacggaatattcgtttgccaatgttatgcaaattgttgcagccatcgaagagtatcgacaccatttagagcatttagaccgcataagaattagctttttcacatatcatagatctgatgcagacattgaaattgttgaagaagactttgatttataacattaaaacaattttatcaattaatgccacaatgagataaactaatattgaatctcgaaattaaatttaaaaaagcagtaagattattttcaattaagaaaatctcttactgctttttctatgttatgaccccaccatcctgttacaaattttctcttcaagattgtactgaagtcaaacaactaatactttataagttttgaatgctatataaatgctcgtaagcaccttgttttgcaatcaattcacgatgcgtacctgtttcaacaatatgtccattttcaattacgacaattttgtcagcatgtgtaatagtggacaagcgatgcgctacgataagtgtcgttcgatctttactcaacacatctaatgcttcttgaataatggattcactttctaaatcaagtgcacttgttgcttcatccaagataagaattggcggattatttaaaaatattctagcaatcgataatctttgtttttgaccacctgataatttaacacctcgttcacctacttcagtgtcatatccctgtggcaagttcataataaagtcatgtgcattagccattttcgccgcttcaactacttcttcatctgttgctgttggacgaccaagtaaaatattttccttaactgtatcagagaataaaatattatcctgttgcaccaatcctatttgatttcttaaacttcccgttaaaaaatctttaatgttgtgaccatctattaaaatttgcccagaagttacatcgtaaaatctcggtattaagttaattaatgttgatttaccaccactcatacctacgaaagcaactgtttctcctttttcaatactcaaattaatatcttttaaaattggagcttcgttatcgttatattgaaaactaacatgatcaatatcaatacgaccttgtttaatttcaataggttgagcaccaacaccatttttgatgtcataatcttcatcaattaattggaatacacggtccattgaagcaaaactttgcgttaaagttgtaaatgatgcgactaaacgacgtaaaggcccgaacaataactctaagtatccaacaaatgctgcaagtgtacctactgtgattgatccagaaatagcaagatatgcaccaacaccgatgacaataattggtccaatatctgtaactgtattaattgcggcaaaggaataggcattccatcttgtatgtttcaacgcacgtgttaggaaattagtattctttttatcaaagtttttcgcttcattgtcttcaatcgcaaaacttttaacgactgaaataccttgaacacgttcatgcaagaatccttgaacctcagctaatgcttgagatctttcacgtgtcaattttcttaatcttccaaagaaaacgtacaccgttaaaatgtaaaatgggaagataaacagtgctgctaaagtcaatttcacatctaaaaagaacattatggatagtgcaataataattgttatacaatctaaccaaatattcattaacccggttaaaatgaaatcttttgtttgttcaacatcattaatcactctagatattacttgacctacttgattattagcataaaatctcgcacttaaagcttgtaaatggttgtataactttttacgtatatcatacaatattttattacttgtccattgcgccaaatattgacgtataaattcaattggtggtctcactattacaaaaataaataatgcgataccaatggcaatagttaaatgatgaactttttcatcagtcgttagtgcgtggttattaatcacgccatctattgcatatttaattaatagtggtataagcattggtataccaaacttaattatcccaacaataatcgttgcaaaaatacgatatttgtatggcttaacaaattgcaaatatcgtttaatcatacaatcccccctaatctattgccctatcctattcataagcataaaaatgaatagaggttggatacataatttgtagatgtaaattcttcttacaatttacatttttaaaattaagatatctcaacctctgtcatattcatgtgattaaatacgttgtcttattcgtatgttatattctattcaatttaatctatggatactgtgtccccacacgacagcaaaagttatcatacttctttacatcactaagtcaatataaatgatttaatcagtatttacactttatttgcttaatactgtctaatttttttgtaacgttctttccaaactttgataaaatctggcgcgaatgggcccttcttctgttctatccattgttgaagaatgtccacgttgcgtcttaaaataatatcaatatcatgcggataattcatttgattcatatgttgctcatattcatcttcatctaataaatgatactttccgtttggatatactttaatatctaaatcatagtctatatattttaatgcctcttcatcacaaacaaatggtgatgacaaattgcaatagtaataaattccatcttctctaaacatgcagataacattaaaccaatattctgagtgaaagtaaacaattgccggttcacgtgttatccaagttcttccgtcactttcagtcactaacgtatgatcatttccaccaatgacaacatgatcagtaccctttaatattgttgtttcagaccaaacgcgatgaatcttaccatcatgtttataactctgaattttaatgttttccccttctttaggtatggattctctgaccatactccacaccaccttctgttaatttaaccattataaattatagcatatttcagaaatagtattatataaatacatatttttacgaaataagattttactacttaataattaaactcggtaatattgctaagtactacaacagagatttacatgtcccatttaaagtatataaaatcatcacttttatatatcaacactttaactttttgacattgttattctatgagatttaaagatatcatttatactttttaaaattaatgtcactatgttttccgataatattaccaatcatcgaatgttacccatttataaattgataaatctttgacataggtacagggaatgtatattgatctcgatcacttaaatcaaaccaaatcatgtcatctggtaatgtttcaatgttaattgctcctgaaacggcgtatactttaatcttccatgttaaatgagtaaattgatgcttcaactcaaaaataggtgtttctactggttgaatgtcatgaccgattttttcagtcattttacgtctagcatgctcactttcaaacataggaaattgccacataccatgcaataatttttcgctacgcttttgcaacagatattgaccttgattatttctaattaaaaagacggattgctcaattacttttttacttacatttttagatttaacaggtaacttttcaaatgtacctttatcaaatgcctcacagttttcttgaactggacaaaataagcataatggattttttggtgtacaaattaacgcccctaattccatcatagcttgattaaacgttccagcttctgtagtaacatacggtaataattcttgttcgtacgatttcctcgtcgattgtaatttaatatctcgatagtcatcattcaatctagaccatactcgaaaaacatttccgtctacagttgctagtggtacattatatgcaatgctcattactgcagcttgtgtgtatgggccaacaccttttaacgctttaaattgatcaggatctttgggaactaagccttcatatttatcatgaacttctttaatcgccgtatgaaaatttcgagctctactataatatcctaagccttcccaatactttaacacttcatcttccgaagcttgactcaaaacttccacagttggaaatcgttcaacaaaacgatgataatagtcaataactgttttaacttgtgtctgttgtaacatgacctcacttaaccaaatatagtacggattggtcgtttgtcgccatggcatttctctttgattttcatcaaaccagtgtatcaaattttctttaaaactagactgctgatacatttataaaaccctttcctcaccaaaattaattgtctttactcataatgtttttattgtacattaaaatcatggttagtatgtaagttaatttagttatttgcgaaattggattataatagtatatataatattatgaaatgagtgaactgatatggacactgcaacacatatcgcaattggggtgggccttacagcacttgcaactcaagatccagcaatggcttctacgtttggtgcaacagctacaacccttatcgttggttcattaattcctgatggggatactgttcttaaattaaaggacaatgcaacatatatttcgcatcatagaggtatcacgcattccatccctttcacaatactatggccaattttaattacatttttaatattcacgttctttagtggaaccaacccatttcatgtatggatgtgggctcagctcgcagtatttttacatgtctttgtagatatattcaattcttatggtacacaagcgcttagacctatcacaaacaaatggattcaattaagtgtgattaacacatttgaccctattattttcacagttctttgtattggtattgtattatgggttataggcttgcatccatttgcagtcttctttcctataatcgctttactaatcatttattacatgattcgttttaaaatgagagccgtaattaagcaacaagctttaaaagcaattcaacaagagcatcaccctgttaaagtatttgttgcgccaacaataaaatttatggaatggcgtgtcgcgatacaaactgatgcacatgactatgttggaaaagcatatggtaggaatgtggtgtttagtgataaagtggaacgtcaaacattatcaacagactccattttatggaaagtcaaaggtaataaagatatacgtacttttttaaacttttcatcaatctatcgttggcaaacaacaacgttagcagatggttctactgaaattcgtttgattgatttgcgttatttaaaaaatgatcattattcatttgtggcaattgcacatgtaacaaacgataatgtcatagaccactcttatattggctgggtatttacagaagataagttacaacgtaaactgtatgctaaataatttcaagttattattcactaaagttaatctataaaaaatgaacaaccgggcagaatgaaaatcaaaacgatttttactctgtccggttttttaatgtaaaactatgaatgcttttacaaaatctaaaatttatattgttgctaacaaactacctttaatgactcgaaatatcaaaatcagtataggaaaacaatatctagatgatattctaattgtttctgattctcacagattaatttacacaacaggtcagctaaacatcatgaagaagtatccgcctcgtctgtactatcatttgaaacatcctgttgattatcagtttgtgtcactttagatgttttattataaattgcgtgtgtcgtataccttgctaatacgaaatttactgcagctattaaacataagaataaaataaagtaaaaatgatatggaatgttttccatacttgatataccaaatatgatagattgtgctataccattaacaatgtaatacattggatttagcattaggatgtgattgataaatacatgatttggatttggtatgaaaataattggtaacaataagaaacacaatacacaaaccccataaaatatgatatttattttttcagttaacagtcgaataagaccaaaagtaacggatattaatcctacaaaaatagttgccatcacaataaaatagaatagcgctatatatgatgtttcgaagtttactggtttaaccaatgcactaatcatcgtcaaaatgactagcataataaaacttaaaatagacataataactactggcgtcgctgcggaaatattaaataacttagtaactaaaaagtcattcatataatgatgataagagatataaattgtgaacatcactaccgcaaaaacaatcaatacaatgattctaaataaccatctcacctctttaacatcggtcaaatgactaaaggaaaatagcgtttcacttgcaataataagtattaaacatgcagctaatacgattagaaaacttttccaactttgttttaaacgttctgttacataccttttagtatgcggtaagtttttaaaatataaaataatattatctagcatctttacacctacaattcaatataaatccatttgtcttctttcaaattggcaatacaatatccattcccaactttagtaatccaaatgttattgttaatattaaacttatcttttaattcttttttatctacaattggataaacaaaaccgtataactgattattatcattgaaaagtaattgtatcggttgttgtgtaacggatgcaacgaaacggttatcatcatcaggaactaaagtttttataactgaactatgctttttatgtaattgactattaaagtatgcatagtaattactataatttgatttcatatatggtgctaattttttaaaactatgcgtttgatataaacctgccgggttaaaatattctaatttatctttactaacatagtaagtcttattatcggcggtaacacgataatttttactattttcgccagtaattgtaactacactatattttggaattgtgacttgtttatccccttgcatatccacactgccattaaaagcaattccataagctaacttttcgccatatggatctttattttcattttgcatcgtagcacgattcgtaaaatctgttatcgaaataattcctatattattgaaaatgagcaacatcatcaatgctaagcctaaaatagtacctgaggctaaagtccaaaaacgcactaaaaacttaggcggttttgcatgattatagcgctcaacacgtttgaaattataggtcatctctggtattcttgtacgattctttttccaatctaaatcaaagttttcaatttcttcttttgagtttagacttaatcgatcacgttcatgttctttaaaagatggaataacttgtttaagtgacccttccattcttaattgaccatgtgaaaaccaagctatgtagttactcacttgtgaaattttatcaatatcatcaccaattgacacaatcgttaaattattttcaatataatcatttgttaattcaatcgcacgttccataaattgtggtgttaaatagtcaataacatgatttaaaataataatatttgattttgatgagcgtgcaatacttaatagtaattgagcgtatgccgctttcgaaatatggttaaccggcttcgttttataatcacctaaatgtgcatattgaataatctgttcagctttatgatcattaatttcatatggaaatagttgaactaactgcgctgtataagcttcaacagtttgatgaattaacgattgatcttcaatatatccgtagaacaaatcttcagtacaaactactttacctttatcaggtttaattgcacctgccaacaattgacctaccaacgctttggaagattcaggttcaccaattatacctaatgcttctccttgataaatatgtaaactaatattgtttaaatcgatatcttcagcatcatatccaaaaggtaaataccatttcttattctgtttattcctatagtagtgtgttacttttagtaactttaaaacaattgaacttcccatctattttcatccttctataattgtaataacgctataggtaatccttcttcgggttcatcgctattaaatctaaacccccacgcaaaaataccttttaatctttctactttaaaatattgattactgccatcagtcagtttataaattttaccaatttctatcttttttctgtctactaagtaactttcggcaacaattactttactttgataaacgtcatattcatttaaaataccattcatctcagcttttctcattttctctttataaagttgtatttcgtgtcttaattctggctcagacatctcactcaatttcttctgttccatcggcaataccactttcttctaatttagctttaattttatcatatttatatccttttctcataaggccttcgatagtttttgaaattaatttctgttgcgtgtacttctttcgatttttattataaattttttctaaatctcgttgtaataaatcgtctaaaaccgcttcatcttgtgtaaaatccatttcattcaatacagcatgaatggtttccatttcaaaccctttttgaattaaagattgcattactttttctttaactttattttgtggccctttttttgttttagatattttttcagcaatttggataatatcatcaagttcctgttgttctctataaagttctgtaaatatttcaatgatatttggttctataccaagttgatatagtttttgttgataaattttaggtcctttatctgtcgtgcgaatcattgtattttttaaactttccgcataatcttgatggtcgattaacttttcgcgataacaatattcaatcacttcagaaatcgcttgctctgatatctcttctttttgtaaatattgtataacttctttttcagttctctttttatatgataaatattggattgctttatttaaacctatgcgataatgatcatacttttgaatctctgccatgtcagcagcttcaagttgttgccctttttttaaattaaatttgactaatgtatcaatatctatacccatttcaaattgttcgtctaaaaaaagattaaaccgttctttgtttttcttttgaacttctattttagtaatcttcggcactggatcaccccgttactttcttaagttttaatacaatactcttttattattcaataagccacttcctatagcaaatgtttaactttaaatatttttcgatgctaacaaaaaatcacactatcatcttttaaaatgaaagtgtgattacaagcaaatctgtaaaatttataaagcagaaacaattcaactttatcattatgacatttcaattaaaccttctacattatagttccaagcatcttacacatgaatgcaagtatttaacgatttaattgtgatatagcctgttgatattgtgtttcattgatataattttgttgcttcattttttctaagttcgtgcttacacgttgcgtaaaattctctgacatattattgatattatatacgctaggtgcattgactttactagctaaaatagcgctttgtaaaactgttatgtgagacattgttgtactatttttattcacggttgttccaaagtaatggtttgctgcgccctcaagcgtatattgattatccccaaagtaaatattatttaaataaaagcttaaaatttcgttcttattatattgtttttcaactcgatgagctacaaataattcttttacttttctagtaaatgaacgatcattatcataaaaataatttttgacaacttgttgtgtaatggtactaccaccttgcacatctctgtcgctaatcgttgaaaataaagctctagttgtacctttcaaatcgaatccatgatgattgtagaatcgttcatcttccattgaaataaaggcacctttaacatactctggcatgttatcagctgacacaaaactacttttattttcaatttttcttagttcatccacattatcgcgtgtagataaaaaatacatgataccaataaacaatgcgataatgattagaatggttaataatatttttaatagtattcgtttacttttttctttttcggcggtttgccaactggttgataatacgtattatagtgaggttcgtgtttcatatgctcaaaatgttcatttgagtttgagtacctatcgcttcttttcatgcgtttgctccttcttttaaaactcacttagtatataccttgagtttaccagtactatcacaaataggctacactttttgggaaaatcagtccaagggcttacaatcgtatacgccatcatacttacttttttgttttttgaaaaaattatagataaatcattgcaattttaaatattaatcatgtcaaatattgttatattttataaaaataaaagaccatccctattaaatgccaatagagacgaccttttatttgttattcatttattaaaactaaaatccatatttcatttcaaacgaaaatatataaattttaacaatcgataaccacaatacttctattgtaattgtttaacgatttctcgattaaaatcatctaaatcgtctggtactcgacttgttacaatattgttgtctacaactactgactcatcaactacatgtgcgcctgcatttgataaatctttgcgtacatttaatactgctgttaacgtacgaccttttaaatcgtctgtatctattagtatttgtggcccatgacaaatggcaaatgttggtacatcatttttagtaaagtatttagcaaatgtgccatatcgaccttctgtatctccacgtaaatgatctggtgaaaatcctccaggaattaataatgcatcataatcttctggtttagcttctgcaatgcctacatcgacagtaactttttcaccgtgtttaccaacaacttcactatttgcagtatctccaatcactacagtattaaagcctgcattctctaatgcctctttagggcttgaatattctatatcttcaaattcgtttgctagaataattgctacttttttagtcattgaaaatcacctttctatatatcattgatataattactatagacaagtaaatcagtgattaaacatacaagatataaaaaatattaagcgactgtcgcgatatctaaccctaacacatcttatgtggcatttacttagatactaatttaaccttttcttcaagctgatctaacaatccaatccattcatctatatcttcaacacgtacttcatcaggatttacatgatcgatatcctcaataaacttatttaaacgcgcttttatctgttcgattgtttgttgttcattcataaaaagttaactccttttattttgttttctttttcattattatcctaacagaaattgcgttaaagcgatataatcttagctatatttatgacattcaaattattttgacttttaaaaatccccttttcaattaactaaaattaagagataatttgttacgagtgataatacgaagtggtatcataccgatatgaaccaaatagaaagaaggaagtttaagacgatgaatagcgtcaaattgaagcaacctgttagcatttacaatgatccatgggaagcatataacgatgttaaagaacatggccaattaactttaagtaacatcgaatttacaactacaaatctttgtaatatgcgttgtagccactgtgcagttggttatactttacaaactgtcgaccccgagcctttagatatggacttaatttatcgtagacttgatgaaattccaaatctgcgaacgatgtctattacaggtggcgaaccaatgttttctaaaaagtctattagaaatgttgttaaacctctattaaagtatgcacatcatcgaggtatatatacacaaatgaattcaaacctaacattgcctcaagatcgttatttagatattgctgaatatatcgatgttatgcatatctcacacaactggggaacaactgatgaattcgcaaatgttggctttggcgcaatgaagaagcaaccaccgttaaaagctaagttaaaattatatgaacaaatgatttcgaatgcacgtacattatcagaacaaggaatgtttgtatctgcggaaacaatgctcaatcaaagtacgctaccacatttacgaaaaatacatcaagaagtcgttcatgatatgaaatgtagcagacacgagattcaccctatgtatccagctgactttgcaagtcaattaaatgtgttaactctagcggaaatgaaaaagacaattcatgatatattggatttcagagatgaagatatttggatgttatttggtactttgcctgtgtttccatgcttaaaggatgatgaagatcaaaagttactatcacgtttaagaaatgctaaaaatgtaacgactagaaatgacccggatggccgtagtcgtttaaatgtcaatgtatttacaggtaatgtaatcgtaactgatttcggagatgaaacaggtacaatttcgaatatacaaaaagataaattaacagatgtatttgataaatggttatcctctgatcttgctaaatcattaaattgtcattgttccgagtttagttgtttaggaccaaatgttcttgttaaaaatatgtactatccgaatatggattttaaagataatgagcgtcatatgcacaaacaaccacaaattatacaattttaaaaactcttaattatgcggagaagcactttatcgataagtagtctccgcatattttaatgctattataaaataaaaaacaattaattgctggcagtactctacttaaataataaagggcatttaataggactaatagtctataataaaaggggtaaattttaactaaaagcataaacgtgcataatcaaaaagacagattgtaggtggaatattcgaacataacagttcaattcatccttaacaatctgtctttatatttttagtctctaatatgttgcacttgagctaaatattcaattgtttgtttactttcaatgcgacgtgcttttcttcgttcaacacgttgtggtgctgtatcataaaaccatttttcaacatcatcttctggatatacaccaggtacatgtttaggtttgccttcatcatctaacgcaacaaatgttaagtaacttaatgcagctaaatcatgcttgttattaaatacatcgtcaattctaatttgaacgaccacttccattgaactagtcccagcgtatgaaaccatcgctacgtattgtaatatgtcccctgttttaatcggctttaagaaatctactgagtctgtagatgcggtaactacttgcgcaccagcatgtttcatagctgtgattgctgcaatttcatcaatattagccatcaatgtaccaccaaacattgtatgatggtgattcgtatcttgagggaaaacttgtctatttttataacattttgattctgacatagatttcattggtctgtcctgatttgtcattattttatctcccaatctatactttaatcacgtatttgacctttaaatacatgtttcatttcctactcagcacctcaaaataacatttattaaaatgttgatgcccaatttccattttcaaatactagttcttttgaaccatcttcgaatatgccataaatagtcaaatcactactaccaatcatgaaatcgacatgtacatttgaatcatttaatccgcttgcaatcttttcctcaacagtcatttccgttccaccttgaatattaaaggcgtaagcagatccaatcgctaaatgacatgctgcattttcatcaaataaagtattgtaaaaaatggtattacgatttgatatcggtgaatcatcaggtactaatgctacttcacctaatcttcttgaaccttcatcagtattgattaaatctttcaataccgcttcaccttttccagctgaaaaatcaataatctctccatctttaaacatcaatttaaattgatcgataattgtgccattataacttaaaggcaatttattagtaacatatccatctactctatttcgatctggtgctgtaaatacttcttcagttggtatattagcaataaaagcttgttccttgccgttaacataacttgtagcatcttcccagatatgatttttcgctaaacctactgttaaatcagtaccttcagatacataatgcaacgcatggtaatttttttgttgtaacttttgagcgtaaacacttaaattagcgatgtgttgacgccaattttcaactggatcgttaccatcaattcgcacaatatcgaatacctcgtcaataaacttaatatatgcttcttctacagatagttcaggatacactctcttcgcccaagctttagatggaaaagcagctacgacccatggaaattgatttttttgtacactttccatatatcctttaaatgcgcgtgcgttttgttgttgaaatgcttgtaatttttggctatcgataccatccattaaatcaggatcttcactaataagtgctaaattagcagcgccacgtttaacgtaatccattctcgcttcaacatcatatgattttatctcatgattagcaaaatgttccacagattcattttcaaattttaagcgttttaaggttggatcgctatatacaacacgtacatctgaagcgccacaatgatatgcttcttctacaattaaatgcgttaattctaatgtttctactgatgatctaataaatactggctgttttggttgaacattcataccaaccttaactaatagttcagcgtattgttgtaacttttctttgtaattagtcaaaattcccactcctattcgtgtcgcaattgtcctaaagcgtcagcaatagctgtcacttcacttggcgacaatctttctcttgattgaacaaaatcatatatatctgttaattcttcttcatttgcatttttatatttttcaggatctaataatccttgattaacaatatttaacttctctctaatagctaatactttctcttcatttgtcatagccacaatgttcacctctaataatagttatgttatcaaagtatcacaatttaataaactttaatagaattttatataatctgctttcttattgtttaaagtcgctataaaatggggatataactacatagtttggaggaatcaaaatggtagatgtagcatttgtctgtcttggcaatatatgtcgttctccaatggcagaagcaatcatgcgacaaagacttaaagacagaaatattcatgatattaaagtacattcaagaggtactggtagctggaatttaggagagccacctcatgaaggtacacaaaaaattctcaacaaacacaatattccatttgatggcatgattagtgaattattcgaagcgacagatgattttgattacattgtggctatggatcaaagtaacgttgataatattaaatctatcaatcctaatcttaagggacaattgttcaaactgttagaatttagtaatatggaagagagtgatgtaccagatccatactacacgaataattttgaaggtgtatacgacatggtattatcatcttgtgataatttaatagactacatcgtaaaagatgcaaatttgaaagaggggtagttttttatggaaaataaatttgttcctggtattttaattggtgccgtaattggtggtgcaattagtttagctgataaatctacacgtcaagctttagttcaatcagttaaagatgcaaaaaatggtaaccgcactcgtaagccttctaaagtcagcaagattaaagacgaagttttatactggaaagatgttgttgaagaaattcgtcgtaataatcctgaattagaacgttcattaaaggatgcgaaagaaacatttgttaatagaaaaaatcaacgctaagatgattttgtttttataaggcaatacttaacaatttggtgtacgcctttcatagttatcattattaaatgataatacaatgattggccaaactgcattgtttcagtattgcctttgttttaattttaaatcaaaatagcctatgaaagatttaaatcaattaatttctataatattatcatttttaaagcatatcattgtttagtttttttataattggataaatactaatagttactttataaaacattacatagagaaaggttaaggagtgcacatgtcgaaaaaggatcactcttcttcaaaataccttaattctgttaaggaagcgcaagaggagtcaaaaaagaaaaataaaagtaatcccaaaattgatgttgatcgtacatatattgaacctcaacaattccaatctaagaaacctaaaaaagatgatcaggttttcttcttatcaagattaaataaacctgcaaaatataagaaagactctaatttcttatcatatctcatctatcgcataggaaaagatgatgcctcaggactagcagcacaaatgacttaccatttcgtacttgctatgttccctatgttgcttttcctattaacattattaccatttttcaatattaagcagagtcaaattactaatatgttaagcaatgcacccgctgaaacatctactctaattaagagtgtaattggtgatataactcaaaactccagtggtggcttattatctatcggtttgattttagcaatttggtcagcttcaaatggaatgactgcaattatgaattctttcaatgttgcttacgatgtagaagatagccgtaatggaatcgtattaaaactactaagtgttgtcttcactgtagttatgggcgttgtgtttgtagttgctctagcattaccaacgcttggttctgtaattagtcatttcctattcggtccacttggatttgacgaacaagtgaaatggatttttaaccttattagaattgtgttaccaatcattattatatttatcatatttatcgtgttatattcggttgcacctaacgttaaaacgaagcttaagtcagtattaccaggtgcagtatttacttcaattatttggttagctggttcatttggttttggttggtatatttcaaattttggtaactattctaaaacatatggcagtatcgcgggtatcatcattttgttactatggttatatatcacaagttttattataattgtcggtgctgaaatcaatgcaatcattcatcagcgtagtgtaattaaaggtaaaacacctgaagaagcagcattagaacatgatgacaataataaaaatcattataatgagaacactagatacgaatatgatgaagatagtaatgcaacacatcaacgtacgtatcatgttgatgaacatcctagtgatacctatccagaagatgataaaaatataaaagacaaaatcgttgataagcttaaaaaagactaaacaccaacaaaacagaggttttcgctaatgattattgcgaaaacctctgttttttggtgtctatttgatgttatattgtgattggcgtaagtaacttttcttaattcgatatgaactattgaattaaattatgttggaatgcatagataacagcttgtgttctatcttgcacttctaacttacttaaaatgttactcacatgtgtcttaaccgttttaatagtaatatgcgatgcactagcaatttcttgatttgagtaacctttcgcaatcaataataatatttccatttctcgttctgtaagcatttcatataactctgcgcgctttttcatacggttacgcattttcactaaaacttccggttcaaaaacagattctcctctagaagttttacgaactgcatcggcgatatcttttgcacttgttgtttttaaaatgtaactatcgacacctgcatctaatgcacgatatacctctttatcttcaataaaactagttaacattaatactttaatttgcggtaaatcttttttaatctgagtcgtcgcttctacaccatccatgtcatccataagtaaatccattaaaattaaatctggcttcaactcatgggctttggcaattgcttctttaccagaagcgccttcaccaactacttcaatatcactttgcgttgatagataacttgaaattcctatacgtaccatttcatgatcatccacaaacaatactttaatcgtcatacgaatcctccttatttaaaggtgctttcacctcgatacgtgtacctgaatctggcaatgatacaatatggaacgttgcaccaatttccaaagctctttcacgcatatttttaagtccataactttgttctaatttttcatcaacattaaaacctttaccattatcttgaattctcaacaataaataatcgtctttattaaacaattctactgtcacttttgtaccgtttgaatgacgcaatgtattcgaaattgcttcctgtgtaattctgaacaaatgatcttcaatacctttaggcactttaaaatcttgtatttcatgcacaactttcattggcacttttttttgtaaatcaataactaaatctttaataccctcacctaaagatttgtcttttaaaccaagcggtcttaaatgtaacagcaaagcacgcatttctaactgcgaatcttgaaccattttctctaaaataggaatttgttggtctaatggtggttctaacttcgtttctttgatagcagatagcatcatacttgccgcaaaaagttgctgactaacagaatcgtgaagttctcgtgctagtctttgacgttcatcttcaataatctttttaactttcacatcattaatattataattttcattggttaagttttgagttttaagtcgcaacttatgcaattcttgatttaaaggtacgagtgtatggtataaatctaacgtttcactatatatttctatattttgatcattaatgccaactgtttcgccttccattgaacgctcaatttgcgtcttaatccaatcattttgctgattgattttgtaagcgagtaccgaaccaacaataatacacaataatatgatgatgagatttaaaaataaaaaaactggtattccgaatatttgtgtataaaacataccttgaaaatagatgatatttacaaaaactttatcgatgaacagaaatgcagctagcatgctatatactaagatgagcattgaaccaattgttctaatgtagtggttcatcgataaatcacctctacgtctccgataaacgttgatacgtagatattaactgtatagttatccggtttcatcatttcttcaatatgaatattgttattttcaactttatatgatttttcattcacgtaagtacttccataaaaagcagctacatgtaaattaatattgtaattaaccggcaatataacctgcactttacctaaaatgtgtctaacaacaatggtattattttccttaatatttgcagcttttgttaagtcaatatgtaggtcgccaattccatgttgaatttgtacatcttcccacttatatacataaactggtgtacgttgctcaccaaaccacttttgtttaataaaagatggtgaagtcataacctcatccgtcgcaactactttttttggtttaaacttgtgtattaaataacgcacaataagtaataataaaaagacgaacaagatgatgattgtatacttattagacaataatgtgaatgcaattaatagcgcgcctatccaaaacgccaaaaggccacgtattttatgaaaataaagatatcctacataaactaatacacatcccaataatagaacgagtaaaaagccaattttttcaaaaaatatgtagtaaaaattggcaataatcattaatgcagtaaaaatgatcaacatttgcgttgatatatatttgtgtgtcatgtttcgccgcctttctatgccacagcgttcatataatttattagatacgatgttttttctgttgctattttttcagttgaagtttgttgaatttgagtttcaatttgtgcataatatgcttcaactttattcaactctgatttaatattttcaatttcttgattattgatttctcttgcacattgaatttgaaatgcttcagcaatatcaatatatttattttctaatgttagcattagactgtcaattaacttgctaagttgttcttttttagtaattaaataacgcatataatcatctaaatttttcattttttcatctagcattaaaaggtagtgcttgatattatttcttactgttgctctcaaaaactgttcaatataacgttcaacatagttcataactatcaccttttataataagttttaaaataccaaatgcgctatgtatcttcgttgatgtcgatgatatgtttgcttaaaaactactttgttacaacatatttttgaaatgacgcattgattgtgttcttaattattataaaacagttccgaaaccaatatgaataggctccggaactaaatgatgttcatactttagtcttagtatatgttgaactattcttcttcaatctttgtcgttaaaatcggaccatccttagtcacgataaccgtatgctcaatttgagcaacaaaacttttatcgctcgtttcaaaagcccattcatttttaccttctgtaacaaatgatgcatttgatgagataaacggttcaatagctaataccataccttcagttaataatgttttgtcttttggatcaaagtaattaagtacatgtgctggtgcttcatgtaatgataaaccaacaccatgacctgttaagtttttaatgactttcaaatcattttgtctagctgtattatgcaccgctttaccaatgttacttaacttagtacccggttttacttttgcaattgcattctcaaatgccatcgttgctacgtcacatactttttgtttcattggatcatctgattctccaacgacaaatgaaatgcctgtatctgcataatagccattcttcaaagccgatacatcaatatttactaaatctccttcacgaatgacacgcttacttggaatcccatgtgccacctcttcattgacactaatacacgtttgaccaggaaaattttcatcatgaattggcgcagaaatagcaccgtattcttcaaataactctttcgcaatattatcaagctctttcgtagtgatacctggtttggttgcagcttgcattgtattgcgcactttagcgcatatgtatccaatttcttttaacgcttgtaattcttcttctgtttttacaatcattttatcccgttccttttttatataattataacttattatagcaaaaattctttgatatactaaagatgttactttagtattttggaaagtgagtgagacatagtgtgataaagaaaaaatatttctttatcgttgtaccccaacttgcattgcctgtagaaattgtagatccaatttctctatgttggggccccgccaacctgcattgcctgtagaatttcttttttgaaattctctatgttggggccccggactataattgaaaaatgcttgttacaagtgcattttatttcagtcaactactaacaatataacattgtggagcccagaactttgattaatgtatatgaaaatcaaagtaatgcttatgtatgattatttcaaatattttacatacatgaacttttccaatgtacgatactattattataaagcgctcgctaagattttacgatgattagaggttaaaaaatgaacgatcaatggtataaacatttaattggtgccagaacaattaaaactggtattgccatttttttaacagctgtcttttgtatggcactagatttaacacccatctatgccattttaacagctgtagtcacaattgaaccaactgccaaggcatcacttattaaaggttatcgtagattacctgctacggtaattggtgcaggctttgcagtattatttacatatttattcggcgatcaatcaccttttacatatgcattgagtgcaacgttcacgattttattctgtacaaaactcaaattgcaagttggtacgaatgtcgctgtactaacatcattagctatgattccaggtattcatgatgcctacatattcaactttttgtctcgaacattgacagcaattattggactcgtgacatcaggtttaattaacttcatggtgtttccacctaagtattatggtcaggtcgaagaaaaattaagtaagacagatgccttgatgtataaattattttacaatcgctgccaagaacttatcttatcaagactgcaatctgataaaagcgaaaaagcatataaaaatattttcaatttaaataatcaagttgaaacgttaataagttatcaacgtgatgaattaagctatcataagaaaaaagaatgtgattggaaattactcaatcaattaactaaacgtgcatatacgaatcgtttgtttatcactcatttatcaaatatcatttacttgcctaaaaatactcgtgttaacttttcaggtgacgaaaaaatggcattgctaaaaattagtagtagcatcaaagatatattttatgatggttcttttaagagagaagatgattctgtagaaactttacgttcgactataaaagcacttgaaattagtggtgaaaatcaaattaaaagtcatatactatacgaagttctaatgatttatcgactgctagacagcagatatgcttaatttaagtaccttatgctaattggcaccatgggagtgggacagaaatgatattttcataaaatttatttcgtcgtcccaccccaactcgctttgcctgtagaatttcttttcgaaattctctgtgttggggcccacaccccaacttgcattgtctgtagaaattgggaatccaatttctctttgttggggcccctgactagaattgaaaaaagcttgttacaagcgcattttcgttcagtcaactactgccaatataacttcgtagagcatagaacattgatttatgtccccgcctctttttatcgtatatagcatgtccctttttaaaattacaagcataaatattcagactcaaatatagccacacgcctaaactacggagggatgtggctgtcttttttgattgtaattacatatcagatttaaatcattaatgtaaagaggctaattcattaataaatttagtaaaatctgatttagcaacatttatccttaatgaaataccagattctgttgccatgtttgaatgccttaaaccagaatcaaaatcaatataaatacaaagcagttcttgattaaaatcaataattgtaaaatgtaaatcaggttctataaaatatatttcagtaacaggattgtcgcaatccatatgtttcaaattgtccatgtcactatcaaagagtgcaaattcaaatttaacttcttgatcttcgaaagttgcactagtgtcgaaataataaattttattatcttcttcgataactacatcttttaaaataaatgttatcgatgttttgctatgtaaataagatgcatcttttaatatcactttagtaggcttcatcgtcaaattcctttcatcattcattttttcatgttgcataatcaccattactattgataattctaggatagatactcattgtataataattattcactagaacaaaaaaacacacatcaatttggttgtttccatccaaaataatgtgtgtgtttatacatatatgattaattactaaacttcatcgtttatcaatattaaatccattgatgcgatgttcagagttaacgagatttcttctgtctatttgctctgtctattaatacttgtttcgcttgtatttccgcttcattatctatttctttaggctcaaacggaatacccttacgttcacaagctttttctaacagataatcagtgatttcgtaatttttaggtaaaattggtccatgtaaataagtacctaataaatttttataatgaatgccttcttttttatcttcatcattattaccataaccaaaagtaacatgaccaagtgtaccgaaatcatgatatgttctaccaccgtgattttcaaaacctacaatagttccaaaagtatcactttcgataacaatatctcctgttaatcggtttgtctttgattcagtataaaaatctaaaatacctaacccttctaattctgtaccatcaggcgtgatatattttttccctaaaaattgatagcctccacaaatcgttaatcccggcataccatcttcaatcgcttctttaagtggtgtcttaattttacttaattcttttgttgctaatgcttgttctctatcacttccaccaccgataaagaaaatatcacattcatcaaaggtaataccttctgtttcattgatttctacgacattaactttaatatttcgttttttagcacgttgtcttaaagcaataatatttcctatatcactgtataaattcaatttatctgacataaaatgataaatagtcaattcatgcatattatgattgacctccttcaaacgaacggtttaattgttcaagcataggcgctaatgatgtatagtttggtattgcaactgtgaaacctttataatccatagtctttgccgttgctttataaatatcacgctcaactataattggtactttaacctctgctaacttcaatcgcaattgaagttcttctgctcgtgtacctgtcacgatgatagcttcaatttgttgcttagataatttttcaaaatctgcatcataaatccatgaagtatctcgaccatctgcagcgttatcatttagcgaaataacatacactttttcgccttctaattgttcaccaactgataaacttgcattcattcctgcaggatttttagctaaattgatcatcgcttcttttcgttcttttttaaagtactgcatacgaccattgtctgatgtatacgtttcaaagccatttttaattgtttgttcatttaaccctagctctcttaaaacagtatatgctgctaacgcgttataagcgttaaagtcacctgcaattttcatatcatatttttcatcattgatatttaaatataaaaacggtgccacatcaaaacttgatatttcatattttgcttgctctcgtttgaaaccacactgacagtgataatgaccaatttgattataatgaatataatcgtattgcaataagcgaccacagtttggacaatatctactttcattcatcgtactttgttcaaattcatggacatgtgctttcataccatagtacacaatcgtatcacttgcgattttcaaacgactcacaaatggatcatcagcatttagcaataatttgatgcctttattactaattgtctctgcaatgttattaaccataatatcaatttcaccgaagcgatccatttgatctctaaagaaattagtaaataccatcattgaaggtgtaacttcttttaacacacgtggaatcgaaccttcatcaatttcgattaccgcaattttagtcttaggtgttgattgcatgatgaatgcagaagttatacctgcagccatattagcaccttcattattgtgtataatttgaatattatttgcttttaaagtatgtccaattaagtttgaagtcgttgttttaccatttgttccactgataaatacaatatcatcaacttgctctgctaattttcttaatatatctgtatccacttttctagcgatttgtccaggtaaatctgttcctcttttacctactgctctacttgctttacgcgccaatttcgctagatggattgccgtccactgtctcatgtgtttcctcctcaaatttccactcgcatcattataacatgacaaggcaacttcaaaaaagtttctcaatcacaaattgatacagtgtttctaaattataatcattctcatttagataattaaaaatgatatttattctcaattaaatatcgctaaatgatacattttctcaattagagtgctaaaataaggcattaaattataattattattatttacaattgagaatgagtttgttatactaagtttaattcatagtaattttaatttacaaataagaggtgtatcaaaatgttaagtaaaaatttattagaagcattaaatgatcaaatgaaccatgagtactttgcagcacacgcatatatggcaatggcagcatactgtgataaagaatcgtacgaaggatttgcaaacttcttcattcaacaagctaaagaagaacgtttccatggacaaaagatttataactatattaacgacagaggtgcacatgcagaattcagagcagtttcagcaccaaaaattgacttttcaagcatactagaaactttcaaagacagcttatctcaagaacaagaagtaacaagacgtttctataacttatctgaaatcgctcgtcaagataaagattatgcaactatctcattcttaaactggttcttagatgaacaagtcgaagaagaatcaatgtttgaaactcacatcaattatttaactcgtatcggcgatgacagcaatgcattatatctttacgaaaaagaacttggcgctcgtacattcgacgaagaataattaaacatcactacaatagacagataaatatcatacgacatgataggcatttgggtcacttacaataacccaatgtctatattattttgctttacggagatcactagattcattttctgaatcattgatctgcgttttttcattttcaaggctaattattgtatttttagtcatttattttttaaactactaatgttaataactctatatttgatgttgaattaatttgacgattttaaagcatatcatcatttactttttaatcagagttacatccaaatgatagatttcacgttataccttcacgtataatattatgtatcgtttgtaagcaaatgactaaaagtctattaatatatacatttaattaattgaaaggattgactacatgatacaagatgcgtttgttgcacttgattttgaaacagcaaatggtaaacgtacaagtatttgttctgtcggaatggttaaagtcattgatagtcaaataacagaaacatttcatactcttgtgaatccgcaagactatttttcacaacaaaatattaaaattcatggcatacaaccagaagatgttgaaaatgcacctacgtttgactacgtatttccatatatgatgcaatttattgcagatttacctgttgtcgcacataacgcggcatttgatatgaacgtcttacatcaaagcattcaaaatattggtttaccaactccaaatttaacttacttttgtagttatcaacttgctaaaagaaccgttgattcgtatcgatacggtttaaaacatatgatggagttttatcaattagattttcatggtcatcatgatgcattgaatgatgccaaagcatgcgcaatgattacttttaggctactgaaaaattatgaaaatttaacatatgtaactaatatttatggtaaaaatctaaaagataaaggctaggactaaataaaatactcccttcaaaagtaagcattgtaaaaatgtaaactttgcagggagctttattttatataaagtcatatatcgtcatatttttataagttgattgttctaaattacctacagtgacaccaataagtcgaattggtacatcagggtcttttaaatcgttataaagtaaatatgcaatattataaatatcttcttcagaactaaccgaatctcttaaactcatctgtttagatagcgtttcaaattgataagttttaattttaaccgttacagttttagctgacttctgtaatttatttagacgttcagctgttttacctgacaattcccatacttttcttaaaatctcttcatcatcattcacgtctgttgcaaatgtgcgttcagtccctactgattttcttactcttgatgatttcacttcactatggtcaataccgcgtgccttgttatataaaccccgacctctttttccaaacaaacgtattaattcaaattccgttttctcatataaatctctaccgttaaaaataccattatcatgcattacttttttggaagctttacctacgcctggaaaatctccaatatccaatgtcatcaaaatatcatggacattttgataatcaatcacagtcataccatcaggtttattcataccactcgctaatttagctaaaaatttgttataagaaacacctgcagatgctgttaaatgtgtctgctctagaatatcttttctaatatactgagcaattttcgaagcaggaaggtctggtctcactaattctgtaatatctaaatacgcttcatccaatgacatcggttctaccttatctgtataacttcggaaaatagacataatctgcgcagatgtttctcggtaagcaccaaaattacttgtgacaaagtatccatttggacataatttatgcgcttgtgacataggcattgctgaatggacgccgtattttcgtgcttcataggatgccgtagagacaacacccctactgcttgctttaccaccaacaatgactggtttccctttcaatttggggttatctctcatttcgacttgtgcaaaaaaatagtccatatctatatgaataattcgtctctcagtcaagtgctcacctccctactaatttttacttttataacgcacaaaaatatctcaacataattatacgctgtgtacgatttttttacataaatcttgcacttagcgataactatattgagataactacaagttgttataaaatcaattgctatttaagcatgatgatgaagacgattgagtaagaaaacataggtaatctgaaataattcaagcaaattcattttgttggtatcatcatattaaaatttattattgagtcggcttttgatgatacaaataaatactatcttcatcttgttgaacatatttaaaactactagatattgttaatgcaacaagcagaatatctataaagcaataagcggtatgcatactaaacataaaaataagtgatgaataaccaaataccttaattaaaataagcaagccagtacttaataggattagtggtgacagcataataattgagaattgccatttgttgaagcaagcatctgctgtttggaataagattctgtctttttttatattaaacataggtttgctatcttttttaaataaaagaaataatgctctatggataagttcatgtaaaatcaataaaataatgaatccagcaaacccatatacaagattgatgatgatattttgatcgacaaccgctgtgacacctaacgcccacttatacgtaaataaaatcacgaataacgcaataacaagttgcaagataataaaccttcgcatttgaaaattatttgtcgttaaatcaattttatgcattaccaaccctcccgatcatgacattcttattcttctttaaatatagtatacaatgtcacatttaatttaaaaagttcatatcaagaaagtaaattggctgtaataaaattttaatatacgacttctttcttcacttattaaggcgaaattttatctcaaatcatgtgcgctatttcaaattgaataatgccactgtctcaacatgtgttgtttgtggaaacatatctaccggtgttacctcttcaagttgatatttttcagctaataataatgcatcacgttgctgtgttgcgggattacatgaaatatagacaatacgcttaggttctaatgtaagcaaagtctgaataaacgtttcgtcacagccctttcttggcggatcaaccattacaacatctggtttaatcccttgtgctttccattgtaaaataacttcttcagctttcccacagacaaaagttgtattattgcattggtttatagtcgcattttgttgtgcgtcttcaattgcagaaggtactacttcaacaccgtatacatgttttgcaagtggtgccatatatagccctattgttccaataccacaataggtatctaatacaacttcattacctgtcaattgcgcatactcaattgctttattatataatttctctgtttgttcagaattaatttggtagaatgactgatcacttattttaaatgtactatctgttaattgatcaataattgtatctttaccatatagcgttatagattgacgtcccataataacattagagtggctatcattaatgttttgtttaatgcttgtcacattaggaaatgcatctaatatcttctcaacaacagcatttttttgtggccactttttaccattagttacaaaaataatcatcatttcgtctgtatgatatcctgttcttacaaccaaatgtctcattaaaccttttttcaattgttcttgataaatacttacatttaaatcttttaaaatagatttaacttcattcatcacttcttgatgttgtgaatcttgtattaaacaactttccatgtcaataatgtcatggcttctttgacgataaaagcccataataacttcattctgttcattcttaccaactggaatctgggacttgtttcgatatctccaaggatctgtcatgccaactgtatcgttaatcttagaattatcaaaatgcgcttttcgctgaaacaaattaatcacttgttcctttttcatttcaagttgtgcttcgtatgataagtgttgaagttggcacccaccacaacgttcataatatatacatggcggtgcaacacgattctcacttctcgtatttatattaagcaacttacctatcgcaaagttcttttttactttgataattttatattcaatttgttcattaattaaagcttgtggtatgaaaataggaaagcgatctatttttacgacaccatggccttcatgcgttaaatcaacaactgttcccgtttttatgtcatttttagctattgcttgcaaaattttacctccaaaatgaacaggttaggaacaaaattatgcgcttcctaacctgccattatatatttcactatttctgtttattcttcgattaaattgtcatcaacatgatcattatttattaactcttcatttacaatatcattaggtgcaaagacatctatatgacgttctagatttaagaaattcgctggtaatttaccaccatattctccatctacatttagttgtaagtctgtgaatgatgaaatattaattgcctttgctttttcataaataactttaggatgcttagtatgttctcctcttgaagctaaagtcataatatgaccaagttctgcaaggtttgatttttcaactataattaacgtaaaatagccgtcatctaacttagcgtccggcactaatttttcaaatcctgccattgaatttgttaaacctaaaaagaataataatgcttctccttggaaaacattaccatcatattcaattcttaaatctacagctttcatttgaggtaacatttcgaaacctttgatgtaataagcaaatggaccaacaatagatttcaatttactcggtgtttcataagagacttgcgtcaattgtccgcctgcagctaaattaataaagtatcgattattcattttaccaatatctactttagtagaatgaccttcaatgatgacatcaagtgcccccatgatgtcattaggtatatgcaatgcacgtccaaagtcattaacagtacccataggaatgacacctagcttaggacgattaggcttttctgcgataccattaactacttcatttaatgttccatcaccacctgcagcgattaatacatcataattttcatgcatagctctttctgcttcaagtgtggcatcacctattttctcggttgcatatgcactcgtttcatatcccgctttttctaattttattaaggcatcaggtaattctcttttaaatagctctttacctgatgtcgggttataaatgattctagcacgtttcctcatatcttatccctctacttaaaattcatatattttaacttcatctttgtttcgtctaatagggagtgggacagaaataatatttaacaaaatttatttcgttctaccccaacttgcattgtctgtagaatttcctttcgaaattctctatgttggggccccaccccaacttgcacattattgtaagctgacagaaagtcagcttctttgtttgggggccccgccaacttgcacattattgtaagctgacagaaagtcagcttctatgttggggccccactagaattgaaaaaagcttgttacaagcgtattttctttcagtcaactacagccaatataacattgtagtgcctaggacattgaatttatgacccaggctcagtcttatttcatcattcttaatatcgttaaagaccaacttgtatcttaaacaaatactatctcaatatgtacaaagcttgttatttattcagcattttttgccgttcttcattatatagacttcgtcagttatgctattttacctttaaaatgatgttgtaaatataatgttgtctttatacaaaaatgttttatacctttttattatacagtttgccttaatataattaaagctaacgcattaataaaattaatatttttaccattaacatgtacaatgaataaagttaaaagtaatttgacttctatagatataaataaaccctcgattgcatctaagtcagcaatcaagggtttattttttaaatcttcatagtttgatgatttaaattatcttttatctaattcttgttttaatagttgatttactaattgtggattagcttgacctttagacgctttcataatttgaccaactaagaagcccatagctttgcctttaccatttttgtaatcttcaactgattgttcgttattgtctaatgcttcatttacaaattttagaagtgttgcttcatcagaaatttgaactaagccattatcttccataatctgtttagcattaccacctttagctgctaactctgggaagactttcttcgcaattttactgctcattgttccgtcttcgataagtttaatcatacctgctaaattttctggtgttaatttagtatctaataattctacttgatttttatttaaatattcgtttacgccacccattaaccagttagatgttaatttaacatctgcaccgtgttcaattgttgattcaaagaaatctgacatttctttagtcaatgttaatacgtgtgcatcgtatgcaggtaaacctaattcatttacatacttagctttacgttcatctggtaattcaggaattgtctgacgaacacgctctttccaagcatcatcaatatataaaggtacaatgtcaggctctgggaagtaacggtaatcatcagaaccttctttaacacgcattaaaattgttttacctgtagattcatcaaatcgacgtgtttcttgtccgatttctccaccatttaacaattcttcttcttggcgtttttcttcatattctaaacctttacgtacatagttaaatgagtttaagtttttcaattcggctttagtaccaaatttttcttgaccatatggacgtaaagagatgttagcatcacaacgtaaagatccctcttccatcttaacgtctgatacaccagtgtattgaataattgaacgcaatttttctaaatatgcatatgcttctttaggtgaacgaatatctggttcagatacgatttcaattagcggtgtaccttgacggttcaagtcaactaatgaatactcacctttatgtgttgacttaccagcatcttcttccatgtgaagacgagtaataccgattcgttttgtttcaccgtcgacttcgatatcgatatatccattttcaccaattggttgatcaaattgagaaatttgatatgcttttggattatctggatagaaatagttcttacggtcaaacttagattctgttgcgatttccatatttagtgccattgcagcacgcattgcccagtctactgcacgcttattaacaactggtaagacacctggatatgctaagtcgataacatttgtatttgagttaggttctgctccaaaatgcgctggtgatggagaaaacatttttgagtccgtttttaactctacgtgaacttcaagtcctataactgtttcaaaatgcatgatttccactccttataatttttcataaacgtcatgtaaattgtattgtgtttcatattgataagcgacacgatataacgttttttcatcgaatggtttaccaatgaactgtaaaccgattggtcggccatttgattgtccacaaggaacagaaataccaggtaatccagctaagtttactggtgttgttaataaatcattggcatacattgttaatggatcatcaatttcttcacctaaattaaacgcagttgtaggcgctgttggaccaactactacatcataattttcgaatactttatcaaagtcatttttaatcaatgttctaactttttgagattttttatagtaagcatcatagtaacctgaacttaatgcaaatgtacctaagaaaatacgacgttttacttctttaccgaaaccttcagatcttgacattttatataattcttctaatgaatgagcttctttagaatgataaccataacgaattccgtcaaaacgagaaaggtttgacgaagcttctgatgatgcaatcacgtaatatgatggaataccaaatttagtatttggcaatgatacttcctcaacgacagcacctaaagattttaaagtttctacagcgttttgaactgcttcttttacgtcatcagctacaccttcacctaagtattctttaggtaatgcaacttttaatcctttaatatctttaccaatttcagatgtaaagtctacatcatcaactggtgcacttgtagagtcattaacatctgcaccagaaatagcttctaatacgattgcattatcttttacatttcgagtcaatggaccaatttggtctaatgaagatgcaaaagcaactaatccaaatcgagatacacgaccgtatgttggtttcataccgacaacgccacaatatgcagccggttgtctaattgaaccacctgtgtctgaacctaagctaaatggtactaagccagctgcaactgctgctgcagatccacctgatgaaccacctggcactgctttatggtcaaatgggttaactgtttttttgaaataagatgtttctgttgaaccacccattgcaaactcatccatatttaatttaccgattaaaacggcattttcattatgtagtttttccattacagtagattcgtaaattggcacaaaaccttctaacattttacttgcacatgttgtttctaatccgtttgtaataatgttatcttttatacccattggaataccaaataatttgccatccatttgatcttttgcttgtaattcatccaattcttgcgcttttttgattgcattttctttatccagcgctagaaaagacttaattgttggatcagtctcttcaattgcatcatatatatctttaacaacatcagatggtttgatttttttgtcttttattaaagttaataaattctcaaccgattcgtagcgaatgctcatcttacgcgtcctcctcattcatgattgtaggcactttaaattgtccatcttctgtttctttggcatttttcaaagctaattcttgtggaatacctttaattgctttatcttcacgtaaaacgttttgtaaatctaaaacgtgatatgtaggttcaacgccttctgtatcagcgctatcattttgttttgcaaaatctaaaatgctttctaatgtgttggccatttcttccgtttcttcaggagaaatttgaagtcttgcaagattcgcgatatgctcaacttcttcacgtgttacttttgtcattaataaaagcctcctttaagtcattcatcactaaattgtatcaaatttccaattaaaaatctaagtatttatgaggtgctactttaatttcatataaactgtataaacattatcattcgtttatcaaatcattttttatgaaaacaacactcttttaatattagacaacccaattcaatattatgattatgcaattttaattataaaaatttgctcatatcaaaaaaatacgaaagcgctttctatattggtatgcaagtatttcaaaaagaataaatttaattttcctacttttctaaacatttatctttatgtataatgttttcaagtaactaaattataaattaaataaagggagtgtttatcatgcttacaatggggacagcattaagtcaacaagtagatgccaattggcaaacttatattatgattgccgtctacttcttgatactaatcgttattggcttttacggttacaagcaagcaactggtaacctaagcgagtacatgttaggtggacgtagtattggaccgtatattactgcattatcagctggagcttcagatatgagtggatggatgattatggggctacctggttctgtctatagcactggtctatcagctatgtggattacaatcggtttaacattaggtgcttatataaattactttgttgttgctcctagacttcgtgtttataccgaattagctggagatgcaattacattaccagatttctttaaaaatcgtttaaacgataaaaataatgtgttaaagattatttctggattgattatcgtagtattctttacattatatacacattctggtttcgtatctggtggtaaactatttgaaagtgcttttggattagattatcatttcggtttaatattagttgctttcattgtcattttctatactttctttggtggatatttagctgtatcaattacagatttcttccaaggtgtcattatgttaattgcgatggttatggtccctattgttgctatgatgaatttaaacggctggggaacgtttcatgatgtagcagctatgaaacctacaaatttaaatttatttaaagggttatcatttataggaattatctctctattttcatggggattaggttatttcggtcaacctcatatcattataaggtttatgtctattaaatcacacaagatgctacctaaagctagacgtttaggtattagctggatggctgttggtttattaggcgctgtggctgttggtttaacaggtattgcattcgtacctgcttatcatattaaactagaagatcctgagacattattcatcgtgatgagtcaagtactcttccatcctcttgtaggtggtttcttacttgctgcgattctagctgcaattatgagcacgatttcttcacaattacttgtaacatctagttcactaacggaagacttttataaattaattcgtggtgaagaaaaagctaaaacgcaccaaaaagaatttgttatgattggaagattatctgtattagttgtagcaattgttgccatcgcgattgcatggaatccaaacgacacaattctaaacttagtaggtaacgcttgggccggatttggtgcatcgttcagtccacttgtgctatttgcactttactggaaaggtttgacacgtgccggtgctgtaagtggaatggtttcaggtgccttagtcgttatcgtttggattgcgtggattaaaccattggcacatatcaacgaaatattcggcttatatgaaattattcctggatttattgtaagtgtaatcgttacatatgttgtaagtaaacttactaaaaaacctggtgcatttgttgaaactgacttaaacaaagttcgtgacatcgttagagaaaaataattcataagtcttaacaaattaaaaaggtactaatgttaatcaaaattatgactaacattggtacctttttattatctttaatttacaattaattactgtaaatatgaacttgcggttctttgtcatcttttgtcttactaattaaagcacgtggttggttaccatctttaatacgaatttcatagttatcgattttatcgaaatatttattcgcttgttcagtaacgtactgtgtaataccaattgtttcagcttgtccatagtaatcgattggtaaatctactactaatcgttgtggctttttatcaacaaatttaactttccctactgcttgtgtgaaattagaaaaatatgattgcaaattatcattaaattgcttgaaattattatttaaattttcatcataatctgctgctgttgaagaaggtaataaagctgatttttcattgatattatgccattcattaagctttgtttgactcttttctgcagtcgcttgagtgataaattcacctggtgtgattgaatcttcacttgattgcttataaattgcaaaatgaattggtatatcttttaaatcatcattttcacgtaaccttgataatatctcactagccatttgtttaccttgctttttaacttcgctatcatctagttttttactaaaagtcgatccatctttttcttttttatagtaataaacactattcatagctaaaccaatcgtcatacctttaatattcttaccttttgtatctccaccaccataaaaatcttgctctaaaatgttagataaataggctggtgatttttctgcaatcttttcaggatctgtttcaccttcgtgtgatggattaagtcctaaattttcattcgctttcttgtcttttttatctttttcagacattttatcgatttcacgttttgtatacttaggatttaaataggcattaattgttttcttgtccaaaaattgaccatcttgatacaaatatttatctgttggaaatacttctttacttaagttcaataaaccatcttcaaagtcgccgccattataactatttgccatgttatcttgtaaaagtcctcttgcctggctttctttaaatggtaacaatgtacgatagttatcaccttgtacatttttatccgttgcaatttcttttacttgatttgaactattgttatgtttttgattatcttttccagcctggtcatccttatggttaccacaagcagcgagtataaagatagctgtaatcaataatactaatgtacgcttcatcgacatacccctctaactatttaattcattttgcttatctacaaattgttgctctgtccaaatttcaatacctaaactttgtgcttttgttaattttgaacctgcatcttcaccagcaataacgacatctgtatttttagtaacgctacttgtaactttagcaccttgtgatgcaagccatttagatgcttcattgcgtgtcatttgatgtagcttaccagtcagtactatcgttttaccactaaattcaggatgtccttcaatatctgatgttttgatacctttataaatcatattaacatgtttatcttttaatttttgaattaaagcacgaatatcttcattttctaaataagtaactacagattgtgctactttatcacctatatcatgaatttctactaattccgcttcagttaccgttagtaatcgatctatcgtttcatatttttctgctaacacttggctcgctttaacacctaaatgcctaatacctagaccaaataataaattttctaaagagttgtccttagcttgttgaatggcagctaataaattatcaacttttttctgccccattctgtctaaaggtaataaatcttcttctgttaaatagaaaatatcagcaacatctttaattaattcgctttgataaagctgttgaataattttagtgcctaaaccatcaatattcatggcttgtcttgatacaaagtgaatcaatccttcaacaagttgtgcttggcattttggattaatgcaacgaagtgctacttcgccttcaatacgtactaattcatgtccacaacttggacaatgggttggcatatgatatgtgacagcatcctcaggtctacgttctggaatactacgtacaacttcaggtatgatgtcacctgcttttttcactacaacactatcaccaattcgaatatctctgtcatgaattaaatcctcattgtgcaaagatgctcttgatacagttgtaccagctacttttactggttctaaaatagcagtaggtgtgactacacctgttcgtccaatacttaattcaatatctaataatttagttactacttcctcagctggaaatttataagcaatggcccatctaggagatttttgtgtgaatcccatctcatcctgttgatctaaatcattaaccttaataacaatcccatcaatatcataaggtaatgactctctttggcttgtccatttttcaatatactctaaaacaccatcgatattatttacacgcgctctatttttattcgttgtaaaacctaatttatctaactcatctaatgcttcactttgcgaacgcgcattgaaatcagtgaaatcattgacactatatataaatacgcttagctttcgttttgccgttaatttagaatctaactgtcttaatgatcccgcagcagcgtttcttggatttgcaaataactgctcatcatttttttctttttcttcatttaatcgtaaaaatgaacgtctcggcatatatgcttcaccacgaacttctacatttaatggttctttcattttcaaaggtatcgcatgaattgtttttaaattttcggtaatatcttcacctgttgttccatcaccacgtgttaaaccttgaacgaagtatccatcaacatatttcaatgatactgctaagccatcaatttttaattcgcacatatattcaacgttgccaatttgttcacgtatgcgttggtcgaattttctcaaatcatcctcattaaatgcattccctaaacttaacattggcgtgtcatggttgactttattgaaagaggcttgggcttcaccgccaactctaactgttggagaatctacagtcttatactcaggatgctcctcttctattttaatcagttcatgaagtaatttgtcatattcactatctggtacagatggattatcctctacatagtattcataactgtattgatttaataaatcatgtaactcgttcacacgagacgataaatcagccatcccttaatcctcctttttttcaattggtgcaaattgcgctaacaaacgttttggcccttgtgatttaaagataatatctagttcgattgagccatttttctcgtttacattactcaccatgccttctccccaggctttatgcatcactttgtcacctacattccaatcagatgacaatacttgttttttcgttgacgttgttcgttgactaaatccgcgtttagcaaaaggttttgccttaggttgtatcgtttgtcgtttgccacttgaatgattttctaatagtgattctggaatttcctttaaaaatctggatggcatatttgactgagggcgaccaaataacattcttgatgtcgcatgagtgatatataacacctcttcagcccttgtaattgctacataacaaatacgacgttcttcttgcatttcatgatcatcttcactcttaatcgctctaatatgtgggaataaagattcttccatccccattataaagacaattggaaattcaaggcccttagccgagtgcatcgtcattagtgttacgccattttcagtatctgcctcatcaatatcagctactaacgataaatccgttaaaaagttaattaatgactgttcttctaatggggtattttcctcatagtcttttggtactgacataaattcatcgatgttttctaatctacttcgagattctaatgtattttcacgttcaagcatttctcgatagccagacttttgtaatacttcatcaactatttcatgaatttctaaaaattcttgttcttttatcaagctttggattaactcgtaaaaattaagacactcttgtgtcaccttttttgacaatccgataaaatcagcttctccaagtgcatcaaacatactgatattgttttgaagtgcatagttttgaactttttcaacagatgaaggacctacacctctttttggaacattaataatacgttgcaaactaatgtcatcattactattggcaattatacgcaaataacttaataaatctttgatttctttacggtcatagaacttttggccaccaaccattgtgtatggcatattagatttcatgaatgtttcctcaagtacacgtgattgtgcattcgttctatataaaattgccatatcttgatatttcttaccattacgttgatgcttcataatttctcgtattacaaattccgcttcatcacgttccgtcattgcttcatagtaatgaattttctcaccattcgtatttgcagtccacagtccttttggcttacgttcagaattatttttaatcacttcgttagccgcatttaaaatcgttttcgtcgaacgataattttgctctaaaaagattgtattcgcttctggatagtctttttcaaatgataagatattttgaatatcagcaccacgccaaccataaattgactgatctgagtcacctacaacacataagtttttaaacttacttgctaataatttaactaatgtgtattgtgctttattagtatcttgatactcatctacatgaatatattggaatttgttctgataatattctagaacttctggtacacgctcaaataagttaatcgttgtcataataaggtcatcaaaatctaacgcttcattacgtgacaattggcgttgatatccactataaaccgttgctaccatttgcgagtgataatctgtggcttctttttgagcatctgcaggtgttttaagttcatttttcaaattactgatcgcaccgataaacatacgaggttcaaactttttactatcaatattttcattttttaagacgtctttaataacagatttttggtctgtaggatcaattatcgtaaaattgcgttctataccaattcgatctgcatcacgacgtaaaatacgaacacacattgagtggaatgttgacatccaaataacttctgcttgatcacctactaatttttgaacacgttctttcatttctcttgcagctttatttgtaaaagtaatagccaaaacattgtatggtgagacatctttttcgtctaataaataagcaattctatgtgttaaaacacgtgtcttccctgaaccagcacctgccataattaacaatggtccttctgttgtctttacagcttcactttgctctgtattcatatgatttaataacgcattcatttactagactcctttatttttactgtttttaaagcttttttaatatctttataaataatatcaccgacgataattgtatctgcaatagctgccatctctgtcgcttgttgttctgaggaaataccgccaccataaaaaagttgcgtttctgttagatgttctgagacagcttgaacctttgatacgtcgccataaatgccactatactctatatacataaccggtaatcgatacatatgattgaccatttgggcatatgcttctaaatcttctgttgttaaatctgtatttgctttggtatgttttgccactttgctatcagcattgcacacggcatacccttcaaatattacttcctcaaaatctatactatgtccatatgttttaagcgcttctaataatgtaccattgtgaaatacaacatctgtactgttcagtactgtaggtacaaaataaaaatcaaaaccaggcattacactttcgatgtttgatatttcaagtactaaaggcaatgggtatcttcttactctgctcattaaatgaatgacattatcttcagtaacgtcatcagttccaccaatcataattgcatctgtttgagacatacaaatcgcatctaaatcatcatctgaaatatgtttagctgggtctaatttaaaaatatggcgccattttttaatgtcatacattttccgaaactccttttttaacatacatatgattatagcatttttaagtgtcgagttctaaagacttaatatgaaatttaagttcttttactctgtaaattttttcgtgaaaaaacaatgattatctaccttattagtgcagatagataaccattgtttatcgttcatttattattcatttgtttcaatattcatacgatctaaaatcattgtataagcatcattaccccattgtaatgaacgcttcactctagaaatcgttgcagtcgatgctccagattcttgttcaatcgttgcataggtataaccttgcttaatcattttagcaacttgtaatctttgagacagtgattgaatttcatttacagtacacaaatcatcgaaaaattggtaacattcttctctattttctaacgttagtattgcatcaaacaattcatctaacgctgcacctcgtaatttttcaatttgcatatcgaaacaacccctataattttattctttatgtcattttaacgcattaatctattaaagtgtagcgatttatattttattaaatctgaatcgttactttatttaattttatgctaatccagcgcgttcgaaaatagtgtcaacttgattcaaatgatgtttaggatcgaaacattcatccaattcttcttttgttaaaacacttgtaatagactcatcttgttcgattaattcacggaacggtgttttcgtttcccaagatatcatcgcttttggttgtactttgtcgtatgcttcttcacgaaccatacctttattaattaatgctaataagacacgttgtgagaaaatcagaccaaatgttttatctatgttattacgcatattatcttcaaatacagttaaacggtccacaatatttgtgaaacgattcaatgcataatctagtgctattgtaacatctggtaacataatacgctcagcagaagaatgagaaatatctctttcatgccataatggcacattctcataagctgtagtaatataaccacgaatgactcttgaaatacctgtgatattttcagaaccaattggatttcgtttatgaggcattgcagatgaacctttttggccttttgcaaatgcttcttcaacttctctcgtttcggttttttgaaggttacgtatttcaacggcaaatttttctagtgatgtcgcgattaatgctaatgtcgcaatatagtatgcatgtcgatcgcgttgcaatgtttgcgttgatacaggcgctgtgccaatacctaaatgtttacacacataactttctatttcaggaggaatgttagcaaaagtacctactgcaccactcattttccctacttcaatttcttctcttacttgtttgaaacgttgtaagttacgttgcatttccgtgtaccacaatgccattttgacaccaaatgtagttggttctgcatgcactccatgtgtacgtcccatcatcaatgtatatttataattttttgctttttcagctaaaacgtcgataaatctttctaaatctttttcaataatgtcatttgcttgtttaataacgaaacttaaagctgtatctacaacatcagtagaagttaaaccataatgtacccacttacgttcttcacctagcgtttcagaaacttgtctagtaaaggctacaacatcatggcgcgtttcttgttcaatttcttgtgcacgttcgacatttacctttgcgttttgacgaattttttgtacgtcagctttcggtatatgtcctaattcactccatgcttcacatgctaaaatttccacttctaaccatgcttcatagcgattttgatcagtccaaatattagacatttcttctctagaatagcgttcaatcatttttttaactcctatcgtatgtatactcgaattttcaaaaacagaacattttttaataaaaataaacaaaaagttcgtttttaactctactcttcacagtttaacagaattggttataaatgtataaaaaatttccgtatattctcattctattttattttttacattaatacaattatctatggcagattaatactgatttctaattgtaaatgttcgcaatactttaatctaattggtatttataatgatccattgagaatatatttttgcattttagtttttctcccctcaactacactatccaactttttattacaattaggacaatcaatagctttagtaataccagaatttattcactttacttctcctattgtatggaattttcaacaatctacttttcctagtttcataatatttcttcttacatttcataatatgttttaaaattattcgcttctaatataacaaattttctactcacaaaaagaatatatattctattgcataggtgtggcattttaaatataagacattaatattgaactccagaatcgtataaatacgaaactgattatagaaaaatacgcagagatttttttaatagtaaatttttatagaaagacataaattgactacgcttctttcaaaatcgactaatatattttcatgaaactttcgatcatattaattattgaatgagatgtttgcaatttagtaaataagctactaaattattacataaactgataatgtataaaaattaattattttttaaacatagattaaaattttatattgaaactcttaactaaatttaatataattattttataataaaataaaggagtttttatatgaaaagaaactttccaaaattaatagctttaagtttaatattttctttaagtgttacccctattgcaaacgctgagagcaattcaaatatcaaagcaaaagataagaagcatgtgcaagttaatgtcgaggacaagagtgttcctactgacgtacgtaatttagcgcaaaaagactatctttcttatgttacttcacttgataaaatctataataaagagaaagcctcgtatacacttggtgaaccttttaaaatttataaattcaacaaaaagagtgatggtaattattattttccagttttgaacactgaaggtaatatcgattatatagttacaatttcaccaaaaatcactaagtattctagttcatcttctaaatacacaatcaatgtttctccatttttatctaaagtcttaaatcaatataaagatcaacaaattactattttgacaaactcaaaaggttactatgtggttactcaaaatcataaagctaaactagtactaaaaacaccacgtctagaagataaaaagttaaaaaagactgagagtatacctactggcaataatgtaacgcaactaaagcaaaaagcttctgtcactatgccaactagtcaatttaaaagtaataattatacttacaacgagcaatatataaataaacttgagaatttcaagataagagaaactcaaggtaacaatggttggtgtgcaggctatacgatgtctgaattactaaatgcgacttataatactaacaaatatcatgcagaagctgtgatgagatttttacacccaaacttacaaggacaacgattccaatttactggtttaacgccaagagagatgatttattttggacaaactcagggaagaagtccacaacttcttaatagaatgactacatataatgaagttgacaatcttactaaaaataataaaggaattgctgttttaggtagtagagtagaatcaagaaatggtatgcacgcagggcatgccatggcagttgttgggaacgctaaattagataatggacaagaggttataattatatggaatccatgggataatggttttatgactcaagatgctaaaaacaatgttattccagtatccaatggcgaccattatcgatggtattcatctatttatggttattaaaatttgtattttagaaaggtaaataatattatggaacaaattgaattatttagtattgataaattcaaatgtaattcagaggctaagtattatcttaatattattgagggagaatggcatcctcaagatttaaatgatagtcctttaaaatttattctcagtacctcagacgattctgattacatttgcaaatatataaatacagaacacaaacaactcacattatataataaaaataatagctcaattgttattgaaatatttataccaaatgataataaaatactactaacaattatgaacacagaagctttgggaacttctcctagaatgactttcattaagcataagtcataagactatctagatatgattaagtaaactattaatcttattaaaggtctctaggaagaaaaaatttcatgcgatgagattgttttagaaaaagcgacgatatatataatctaacaataatttttaaaatattaagaacccccagcatatgctttatatagcttgatgggggtttctcatacaatatggatcgagcatcttgcatgtataaacaaataggctattcaaagtaaaattactcaaactttgaatagcctttcctcttcaaatagtctttatttaaattggattatgttattggattttcttacctacaaaaacgatttcttgatgtgatacttcaaccgtgccatctttttgctcttgaaacacgggtttttcaatacgttttaccggcatatacccttgcattttcattcgtgacaaacaatcagcaattgtttcattctcatttactttgaatttcatgttctactacactttccagttcttctggttcataatctttaagctttctacgacgaatgcctttagtccagaatccaccatgtatgtttcgaggttcatacgcaatgataaatgctttcggatctaaattttttatcgtatccatcaatttacgttcatattttcttggtgttaaaatttgcatcaccatacgactaccatctctaccaaacgcagcatagtgcgtaacgccatatcctaaatttcgaagttcattcggtaaatctaactcatattctgctgaagttacatttacaactgtataacctaatgccagtttttcttctattttcataccaacaatgatacctattgaaaaaccaaatgcgtaggcaataatattttgaatatggtctaaattagacataaccaaacctaaaccaacgatataaactaacacttctaaaaaactaactgatgcagcaatataacgataacctttcaacgttaaaattgttcgcatcgttaaaaacgttacataacaaacgttaatgataaatatagttagtaccattaaccatggattttctgttacgaatgacataaggcgccccactctctttcaattacactttaaataccaaactgcttcaacctaaccttaatgaatgcatattaatataatatagtacgaaaactctcataaataaatagcgaatttgtcataaataaaaatttattctcaaatgaacatacttactttagttcatacactttcaatttatacactgaagtagtctagctgaatgtggtttaatgttattaattctaactcatatttaatttaagtcacacgttagaagaaaaaattaaattaggattttggccacgtgtatcttgtatatgcaagttcacgtttgtgtgcatttcgtatataatgattttcaattactttttgttcttctggcgtaactggcttaccttctaaataattatcaatcgcctcataagttacacctaatgcatcttcatctggaagctgtggtttatcatcttctaaatcagcagttggcgttttttcatataattcctttggcgcaccaagatacgctaataattgacgaccttgtcgtttattcaaaccaaatataggtgcgatatctgcagcaccatcaccgtacttcgtataaaacccagttatattttcagctgaatgatctgttcctactacaataccttgtcggtttgaagcaattgaaaattgtactttcatacgttcacgcgctttttcatttcctttttggaaatctgtaagaacaataccggcttcttttaatgattgcacactttgatcaactgcaggcttaatattgactgttactatttcatctggttcaatgaatcgcaaagcttgctcaacttcatcagcatctttttgaactccataaggtaatttaactgcaataaacgtacaatcaatgccttcttcacgtaattcgttaacagacatttgtactagttttccaactaatgtagaatcctgtcctcctgaaatacctaacactaaagattttataaatgaatgtgattgtacataattttttataaattgctttaattccataatttcttcagcactatcgatacgctttttcactttcatttcttgtacaataacgtcttgtaatttactcattatcttcttccatctccttaacgtgttccgcaacttcaaaaatacgtttatgtttattatcccaacatgccttgcttaaatcgactggatattcttgtggattcaggaaacgcttattttcatcccaaatagattgtaatcctagtgctaaatattcacgtgattcatcttctgttggcatttgatatactaatttaccattttcataaatattatgatgcaaatcaatggcttcgaaagattttataaatttcattttataagtatgcactggatggaataattttaaaggttgttcatcgtatggattttcattttccaaagtaatataatcgccttctgccttacctgttttcttgtttataatgcgatatacatttttcttacctggcgtcgtaaccttttcagcgttatttgataatttaatacgatcactatatgaaccatcttcattttcaatagctacaagtttatatactgcacctaatgctggttgatcgtatcctgtaatcagctttgtaccaacgccccaagaatctacttttgcaccttgtgctttcaaactcgtaatcgtttcttcatccaaatcattagacgcgataattttagtttcagtaaatcctgcttcatcaagcatacgtcttgcctctttagataaataagcgatatctccagaatctaatcgaatacctacaaagttaattttgtcacctaattcttttgcaacttttattgcatttggcacgccagattttaaagtatggaatgtatctactaggaacacacaatttttatgtctttcagcatattttttgaaggcaacatattcgtctccataagtttggacaaatgcatgtgcatgtgtaccagacacaggtataccaaataatttccccgccctaacattacttgtagaatcaaagcccccgatgtaagcagctctagcgccccacaatgctgcatcaatttcttgcgcacgacgtgtaccaaactccattaatttatcatttgatgcaatttgacgaattctgctagcctttgttgtaattaatgtatggaaatttacaatgtttaataaaattgtttctattaattgcgcttgaatcaatggtgcttctacgcgtaacaatggttcgttaccaaagcataattcgccttcttgcatcgaacggatgctgcctgtgaattttaaatcttttaaatatgataagaaatcatccttgtagccaatagactttaaatattccaaatcagattctgaaaatccaaaatgttctataaaatcaatgacgcgttttaaaccattaaaaacagcatagccactattaaatggcatttttctaaaatacaaatcaaatacagccattttttcatgaatattatcattccaataactttcagccatatttatttgatataagtcattatgtaacattaaactgtcgtcttctaattggtacacttgtatctctccaatcgacctaaatattttcttacattttatcataattcatttttttatatacataagagccccttaatttccatacttttaattaaaatcaaccaacaatttaatgacatatacataatttttaagagtattttaataatgtagactataatataaagcgaggtgttgttaatgttatttaaagaggctcaagctttcatagaaaacatgtataaagagtgtcattatgaaacgcaaattatcaataaacgtttacatgacattgaactagaaataaaagaaactgggacatatacacatacagaagaagaacttatttatggtgctaaaatggcttggcgtaattcaaatcgttgcattggtcgtttattttgggattcgttaaatgtcattgatgcaagagatgttactgacgaagcatcgttcttatcatcaattacttatcatattacacaggctacaaatgaaggtaaattaaagccgtatattactatatatgctccaaaggatggacctaaaattttcaacaatcaattaattcgctatgctggctatgacaattgtggtgatcctgctgaaaaagaagttacacgcttagcaaatcacttaggttggaaaggaaaaggtactaattttgacgtgttaccactgatttaccaattacctaatgagtcagttaaattttacgaatatcctacttcattaattaaagaagtacctattgaacataatcattatccaaaattaagaaaattgaacttaaaatggtatgcagtccctatcatttccaatatggacttaaaaatcggtgacattgtatatccaactgcaccctttaacggttggtatatggtaactgaaattggcgtacgtaactttattgatgattaccgttacaatttactagaaaaagttgcagatgcgtttgaatttgatacacttaaaaataattcatttaataaagatcgagcacttgttgaattgaactatgctgtgtatcattcctttaaaaaagaaggcgtatcaattgtcgatcatttgaccgctgcaaagcaattcgaactattcgaacgtaacgaagcacaacaaggtcgtcaagttaccggaaaatggtcttggctagcaccgccattatctccaacattgacgtcaaattatcatcacggatatgacaatacagtaaaagatccaaactttttctataaaaagaaagaatcaaatgctaaccagtgccctttccatcattaagttagtagaggtgtagcatatgcaattatattatttaggccctaaaggtacattttcatatttggcttgtcgtcagtatttttctgaaaatgaagcaacttttcaaccaaagtcaaatttttttgaagtcatcaaggcagttgcagatgatgacacatcgattggtgttgtccctattgaaaattctatagaaggaacaatcaacattgtggcagatgcacttgcacagcaagatgtctttgcacacggtgaaatacgtttagatattaactttgcattatatggtaatggaacagattccatttctgatattaaaaaagtgtattctattgcaccagcaatcagtcaaacaacaaattacatacatcaacatcaatttgactatgattatgtcgacagtacaattcaaagtttgactaaaattgaaaatggcgttgcagcaattgcacctttaggtagtggcgaagcttatggttttacacctattgatacacatattgaagactatccacataacgtgacacgttttttagttataaaaaatcagcagcaatttgatcaaaatgcgacatcattgatgtttttaattacaccaatgcatgataaacctgggttgttagcaagtgtgcttaatacatttgctttgtttaatattaatttatcctggattgagtctcgtcctttaaaaacacaattaggtatgtatcgatttttcgttcaggctgattctgcaattacaaccgatataaagaaagtcattgctattttagaaaccttagatttcaaagtagaaatgattggtgcttttaattaaactttattttctaggttctacaatttaaataaaataaagagtcaaccaaggattaaaataggaatccatccttggttgactttcttttgtttgtattgtttttacacgatgctgcggtatacgtttcgttaccactcgtccaagcaattgctaatgtaaccttttatttttcgttctaatctgcaattactatttcaatggcagtggttgatttatatcaatacctaaaactataggcattacataatacacgactaaaataataattattgcactgattaagtttacccagaatcctactgatgccatttgtttgatagatattttaccagaaccaaagataattgcattcggtggtgtccctactggtaacatgtatgcacagttagccgccatagctgcaggtgccataagtagtaatggatgcactccaacagcaacagacaacgttgctaaaatcggtaaaatcatcgttgcagttgcagtattagatgtcacttcagttaaaaataagacaaagattgttatgacaattacaataagaatcggactaacaccatttaatgatttcaactgttcgcctaaccattttgctaaaccactttcagaaatacctttcgctaatgctaaaccgccaccaaataaaattaatacaccccaagggagctcttttgcaacttcccagtcaatgatacggcgatgtttttcagtatttttagctggaataataaataataatattgatataaaaatagcaatcgtaccatctgcaacagatgacgtaacttcccattttttcagaagaaactctcttgtaatccataataagctagcaagtacaaagatagtttgtactaccttttcttcatacttcattttgccaagctcgtctaacttttgtttaattaacgtctgaccaccaggtaaatatttcaaatcatgtctaaacgcaacatatcttaaatagagccaagtaatacctaacaaaacaatgaccgttggaatccctacaatcatccatttagcaaaactaatttcatgtccaaaatgttgcatgtattgtccttttaaaataattaatggcggggttccgattaatgtacccaagccaccaatcgtacctgcatagccaattgctaaaactagagatttttcaaacttttgaatacttgtttgattcgtattggcttcttgtaaatcatgtgcttccttaataattgctaaaccaatcggaatcataatcattacagctgcagtgttcgatacaaacatagataagaatcctgttgccaccatgaatccaagtaatatttttgaagtgcttgcaccaatcaaattaataattgtcaacgctactctcgtatgtaaattccatctttccattgcaattgccaaaataaatccacctaaaaacaaaaagataatatcattgccatattcggatgatacttgttctggtgtaagtatatgacctaatggtaataacacaattggtaataagctcgttgctgcaataggaattgcttcagtaatccaccaagtcgcaatccataaagtaatcgctaaaacatagacgcctttccaaggtaagtcttgtggatgaaagaataataatgttaataggaaaagtaatggacctaatattagtccaataagttgtcccgcactaaacggtttctttttctttgattttgaaaagaatgttaaataccttttcgatatcattgattgatgttgattgaaataagccataaatttccccctcatgatgattatgacaagctacttcaactcactatattagagtatagaaagttgtctatcttgtattatcattaccgtcaaaataccccttttatcagataattgggtttattatagcatatttataccgttttatgaatgcgctttcaaaaattatctactattcttaatcctaatgtcatgcgaaactttttacttttttatttcatctacattgattgtagtaacttgaatacccgcttcaacaggacttaaaaacactgtatcaatatcttctaaatgaattgattgagtcgaattattgaatgtattcccaacgattaatacatctttatgtttaacattattataattacgtacatgtatcgcatctttagacattgatcctttaaattcatttccaattatattcatatttatgcctgcttgggaacctaagtcttttcctgtcatcacatctgctgcatttttaccatctctaactcctaaatatctaatgccaccctcacagttaataaacttattattaataatgaaagcatctttatacttcaagggagttaatgcataaccttgtatatcttcaaatatattatttctaatatgaatattctcatagtatcgattatgtctacttgcatgtgagccaatagcacgattccaacttcccatttcgggcaattctgaaggtccaaaataacaatcttcgataatgacatttttcgttatcgtaccatctgtcgttccgaattttggaaaagcaccaggtacttgaatgtctaattgtattgcttcagaataaaagcgttcgccactatagtctatgaatccttcaaatgaacagcttttaatatagagtccgttaatcccacaagcatcaattgcatgaccactcactacattcttaatggtcacacctattaattgaatatcttcagcatgcccaatgcacatagctgtattgttataaggatacgatacaccattcatatcaaacttgccgcctttaatatgaatatgactgtgtccattataaccacgataaaaaccaaagcgacgaccattttttaataaaggaccagaatgacatcggcgtaaaatagtttcattatctaacaaaagtgttgtattgccatatatcgttaatggtttgcaaatatcatacgtccctttcggtatataaactgtcgttggtttacatcttccacgatttaacgcacgttgtattgctcgagtatctttagttttgtttatgcctgttaacccataatctttcatattgatatacataaatcgtcatcctttgtctattttctaattactcatatattaaccaattattcaaattataatcgtgttaggttgatttaacagatagtcataaatctcgtgatgccatctattagcatttttatattcaaaacatcaacacttgatattagttctaagtttgtcacatttagtattctattacagctattttaaaactatcgcaaaaacttcttatattatttgttgattgcgtgatttgctcttccaaaaaagttgattaatctatatacttaatctatatttatatattaaccattagggttaaaaattactctagcatttatgaatagatgggagtttattttattattatataggagagatgttgaatgacacatcgcgcactattagttgttgactattcatatgactttatcgcagacgacggcttactaacatgcggtaaacctggacaaaatattgaagattttattgtttctcgtatcaatgactttaattattatcaagaccatatattctttttaatggatttacattatttacatgacattcatcatcctgaaagtaaattattcccaccacacaatatcgtagatacaagtggtagagaattatacggtaaagtaggtaaattatacgaaacaattaaagcgcaacctaatgtacatttcattgataaaacgcgctatgattcgttctttggtaccccgcttgatagtttattgagagaaagaagtattaatcaagtcgaaatcgttggtgtatgtaccgatatttgcgtgttacatacagcaatttctgcatacaacttaggttataaaatttcagtacctgctgagggagtggcttcatttaatcaaaaagggcatgaatgggcacttgcacatttcaaaaactcattaggtgcagaggtagaacaacacgtttaaatcgtgctaaaataattataaagaatacaatttacaagggagatatttgacaatggctaaaacatatattttcggacataagaatccagacactgatgcaatttcatctgcgattattatggcagaatttgaacaacttcgaggtaattcaggagccaaagcataccgtttaggtgatgtgagtgcagaaactcaattcgcgttagatacatttaatgtacctgctccggaattattaacagatgatttagatggtcaagatgttatcttagttgatcataacgaattccaacaaagttctgatacgattgcctctgctacaattaagcatgtaattgatcatcacagaattgcaaatttcgaaactgctggtcctttatgttatcgtgctgaaccagttggttgtacagctacaattttatacaaaatgtttagagaacgtggctttgaaattaaacctgaaattgccggtttaatgttatcagcaattatctcagatagcttacttttcaaatcaccaacatgtacacaacaagatgttaaagcagctgaagaattaaaagatattgctaaagttgatattcaaaagtacggcttagatatgttaaaagcaggtgcttcaacaactgataaatcagttgaattcttattaaacatggatgctaaatcatttactatgggtgactatgtgactcgtattgcacaagttaatgctgttgaccttgacgaagtgttaaatcgtaaagaagatttagaaaaagaaatgttagctgtaagtgcacaagaaaaatatgacttatttgtacttgttgttactgacatcattaatagtgattctaaaattttagttgtaggtgctgaaaaagataaagttggcgaagcattcaatgttcaattagaagatgacatggccttcttatctggtgtcgtttctcgaaaaaaacaaatcgtacctcaaatcactgaagcattaacaaaataatactatattactgtctaattatagacatgttgtatttaactaacagttcattaaagtagaatttatttcactttcaatgaactgttttttatttacgtttgactaatttacaaccctttttcaatagtagtttttattcctttagctaccctaacccacagattagtgatttctatacaattccccttttgtctttacattttcttaaaatatttgcgatgttgagtataaatttttgttttcttcctacctttttcgttatgattaaagttataaatattattatgtacacgattcatcgctctattttcaactttcaacatatataattcgaaagaccatttaaaattaacggccacaacattcaaatcaattaatcgctttttccaaaataatcatataaggaggttcttttcattatgaatatcattgagcaaaaattttatgacagtaaagcttttttcaatacacaacaaactaaagatattagttttagaaaagagcaattaaagaagttaagcaaagctattaaatcatacgagagcgatattttagaagcactatatacagatttaggaaaaaataaagtcgaagcttatgctactgaaattggcataactttgaaaagtatcaaaattgcccgtaaggaacttaaaaactggactaaaacaaaaaatgtagacacacctttatatttatttccaacaaaaagctatatcaaaaaagaaccttatggaacagttttgatcattgcaccatttaactatccttttcaactagtgttcgaacctttaatcggtgctattgcagcaggtaatacggcaattattaaaccatctgagttgacgcctaatgttgcacgagtgattaaacggttaatcaatgaaacatttgatgcaaattacattgaagttattgagggaggaattgaagaaacgcaaacgttaattcacttaccttttgactatgtcttctttacaggaagtgaaaatgtaggcaaaatcgtttatcaagctgccagcgaaaatttagttcctgtgacattagaaatgggcggtaaatctccagtcatcgttgatgaaacagcgaatattaaagttgctagtgagcgcatttgttttgggaaattcactaatgccggccaaacatgtgttgcaccagattacattttagtacacgaatctgtaaaagatgatttaatcacagccctatcaaaaacgttgcgtgaattttatggtcaaaatatacaacaaagtccagattatggccgcattgtaaaccttaaacattatcatcgtctgacttcattacttaacagtgcacaaatgaatattgtatttggtggtcatagtgatgaggatgaacgttatatagaaccaacattgttagatcacgttacaagtgattcagcaattatgcaagaagaaatttttggtcctatcttaccgattttaacgtatcagtcattggatgaagcaatagcctttattcaccaaagaccaaaacctttgagtttatatttatttagcgaagatgaaaatgctacacaacgtgtaataaacgagctatcatttggcggcggcgctattaatgatacattgatgcacctagcgaatcctaaattaccatttggtggtgttggcgcctcaggtatgggacgctatcatggtaaatattcattcgacacttttacacatgaaaaaagctacattttcaaatctacacgattagaatcaggtgtccatttaccaccatataaaggtaaatttaaatacatcaaagctttctttaaaaattaatttttgagacaaaaataaaccatgcttccataatttgatgttcttgaaaacaataaatttcaaggtatacacaaattttttggaaacatggttttctttttatcatgattaattaaagattaaaatatgacacatacaccttcagatgctacacgagtgttatcacatagcgtaattttacctgtttctttatttctttcgaaaacagttacaactgaatctccttgctcatgagcacaaactaaaaggtcatctgatgaggcaatattaaaatctcttgggaattgaccaccactttcagtaattgttactagttctaagtgttgaccattatcaagaactttaaaaattgcaatgctatcatgccctctattagatacatataagaattgttgatcatgagataaacgcactgctgcaagtttagtatctccatcaaagttttcaggaattgttaaatgacgctcgagctcttcaaatttaccgtcattatattctgcaacactcacagtatttgataattcgtgtacgacataagcaaattttccattatcatgaaattcaatatgtcttgtcccatcactatctttaaataaagattctttataaaattcaaacccgttgtcatcaaatttataagtaacgatacgatcagcacctaaatctgttactgcaacgtacttaccatctggagtttgattaatataatgtgcgtgtggatgatcttgtctttcatgtgtacctgttggaaaatcatgtgcaagttcttgaattagacgtataatttcacctgtgtgcgtatttaattcatacatacgtatgatgccagcaccatataccgcttcaaataaatatcgtttatcttctgaaatcgatacataacaacctgtaccagcttttgaagacaaacatttatttaataaatgcaattcaccattgtcatcaattttcaaacttgcaacaccgcattgttctccttctttgttgattccatataaaacttcattattacgcaccaaatatgtagacgcttctaattcaaatcctgtttctaataaatcaatacgtgactgattttcgtttaattcaaaacgataaatccctttaccattctttttagtgtaagaaccaatatatccatttgtcattacttttacccctccatgttagtcttattttcattttattaaattttagctagaattaacaatcatttatcatttccttaaagctaaaactatttaactactttaaaagaactatttgctgtgatatgtcattattcgattttaattaatccctcttttttacttacacgagcattaattattaacgcgtttatgcttccacaaaatttttgttgcaaaatagaacacatgttcgtataatgtaattatcagattggggtgaattaaggatgacaagttatgaagaagaaactgattatcgtaacgttccaagagaattactagataacaatatacctatgggaagaggcatgattaaatgggctccttttgcaacattacccgaacaattcgaaacgattcaacaatacattatcgaccaaaacaaaattacacgtcctgtattatcagatgatcaattggctgagctaaacattcggctacacgaggcgctacaatatgcccaacctgtagaagttaaattttataataatggctttgtagattcagtacgcttaaccatttatcgtattgatgctattaattatgaaattgatggttatgtttacaatcagcaacaacgtcaaaaaatttctatctttgatatcttagatattgtcttgttaccttaatgctttgaacataattaaacagattgagtatatgcatataagatgatttttaacatcatttttggatgataggatgttgcgccacgatgatgtctgaattcatcgaattcgctatcaggtattgtttcaacaatttcattaacatatcgtgaaatatcattttgagggattctaacagaagtttctattggtagtgtagttggggcatgttataatttttatacataaggcacctcgttaatttagtttagtggtatttattaaattataagaagggacccaacacagaaaattcattttattgaattttacatttatgtgcaagttgggcaaagtgtcttattttttaaaagtatttcaaagtaaaattacatgttaatacgtagtattaatggcgagactcctgagggagcagtgccagtcgaagaccaaggctgagacggcaccctaggaaagcgaagccattcaatacgaagtattgtataaatagagaacagcagtaagatattttctaattgaaaattatcttactgctgttttttagggatttatgtcccagcctctaaatgttattagttatttttactttcaatatcagaaataatttctttagtttttctttcaatatcttcaaaatcttttttaaagatataagcaaatgctactacaccaacaccagcaactaatgttgtaatagcaactaagctaaatacgaatttaaacacacatttaataaaattccacatctcaatttcacctctgttaaattaaatacctatctacatttcattatactatcatatatagaataatcattaaataaatacccactttcacgaaatatattcatcaaattatatagtgagcaagctaatgattattttcaaaaatgccgaggaacctctgtttcaacgtgacatgaccttatatgctaatgttaacaatgactattatcgtgaatgctaacttaagattgatatttatgataagatgattttaagtttttaactcaatatccccaccatctataaaaatatgttttaactgattgataagtcttatacaccgagaaatcacctcaaacaattttatatttcatttagtaaaatataactttatttaacatgacattcaatatacatacgattactatttatttacaatatattacaactaaaaagaaaggggccgatgatatgcaacaagtgacatcagatatcatgacttttagaggttcacatttcgagttaggtgttaaaactggtaaatggcttcaacaaacacctcttctaaaaaatcgagaaaaagaatggaaaaaacgtgtcccacgtttcgatatagatgtaaatgaaacttatcaaatattccaaacatacgcacctcaaatatgggaagaattaatgggactacaaagtatactcaaaatgccaacacgccaaattattttaaactttggacattatcgttttaccgatttaaaagagagtggttgcacggtctttcaaggcaaagacttcatggttagaaattatgattaccaccctgcaacttatgatggtcgctacttactttatcaacctacagatagcggtttagctcaaattggtcctgtatcaagggtaactggaagaatggatggtatgaatgagtcaggattaactatgggctataactttatgcaccggaagaaaccagcaaatggttttgtatgttatatgattggtcgtctaattcttgaaaattgccgaaatgtaacagaagcaatccaattattgaaagaaataccacacagaagctcatttagctacatactgatggacaaatcattgaaccatgcaattgttgaagtgacaccgagatcaatagatgttcgttatgataatatatgtacaaatcattttgaaatattaacacatgaaaatcgtaattatacaaaagaatctaaagaaagactggcgcgtaccatttcacaaactaatgataatttagatatgactacagcatttaagttattcaataatcctcagtatgaaatttacagtaaactattcaaaagctggtctggcaccatccatacatcaatgtatcaacctgaaacattaactgcatattttacattgggagaaaatgcgccaccagaaataatagatttcaaatcatggttagatggtcaagaccttaatatcactcactttactggcaatatagataccgacttaacttttgccaacaaataaataacaccgatattagagaaattatgcttcctaatatcggtgcttacatcctttatttattcaactttgatattaccatcaatcgtataaaattctaaaacattgtcgcttttcccaactttaccattagtaaatgttttatttttaactacgctatcacccgttcccggatttagctttagtatagtgtcttcaggtttactatcatacttaaaacgaatatctccttgtttagtagaagcttttgcatctacttttgatggcatgtttttaaattcaatgtcaccatgatcgtttaaaaatatggattgtttaatttgactcttgtcgatttgtagcgtaccaataacaactttaatattgctatttttaatgttacttttactaatataagtagaactattatttgtctttgaatctagtgcgtcaagatttgagtttttaataactacttcaccgttaatgctttgaatacttgtgttctctaaatcaacatcactgattctaacacttcctgctccagatgatagatttaaacgtttaatcattttatcaggcatttcaatcgttaacgttttcttattctcatgaaaaggattcatatcaattgcatatcctcttgtcttagactttttatcactaatcttcaacgtcttatctactatattaattaatatatcattgtcaccatcatatttaactctaaattgattcccccgttttatacgaagttctgtactatccaaatttatagatacattgtcaaaagcatcgtctttgaatgttttatcatattgtttagtaccatatttgtttttatcatagctgaaccaaataatggttgctgctgtaaaaaagacaacaaacactaaaagcccaataaaaaagaatttcttcattttctaacgcttcctttgacagttttaatataccaaagtaaatattttaagattaaacgataaatgtattctaaaatcttaaatatgacaatgataaatactaatcctaatcctgaatatgatatggcaaaaaatacattactaattgagtccacaattcctctggatattgctgatgctaataaaataattggacaaaacagcagcaaaagtgatattaaaaataatgctaatacaaataatccaactatagatactggtataaggatgacaaaaatagatagaatgcctaaacttaatgaagcagcaacagctcttgaaatattttcaaatgttggtttagattcagcataatcaatgacacttctagcttttgtttcagctgcaacatcttgtgggtcttttaacttctttaaaatttccccttcatcaacgccattaagttcttgctcataaaaataacgttcatattcatacattttttgatctcttaaatgcctaggtagcgcatcaagtgctgtttctaattcatttaaataagtaatcttgttcatataggtcactcatcccaataaaattattcattcgttttttataactttaagacctaaagctatttactaaaaaattcaatacgtttaatttctaaatcttgataaagtaagtttaattttaaatggttatctctatcaatatactttaccgatgagaaatcattgccaacttttgttcttttatatccgaatccaagattttcaatcgcgttatttatcggcgaaccaattcccccatcaaaattagtatgtatcttttcatctcttactaatattatccccttaacgatgttatccttttctctcactttaacggtaagatcagggtgagctttactgttataaaatttaaaacgatcaaacttaatttttttatttacttcatagccttttttatcaaacttctcatttaatttaatatcgtttatttcaagattagacaaatccacagttttcgtatgacgatattgatataaaccaattaatacaccaaaagaacagattaaaaataatataaacacaacccagcgattttgaatacgcactgatgtcaccctttctttgtacttatttaaatatagcataaggtgcttcccgtttcatccttaacaaaaattaacaaagaatttgcaattaatttatttcattaccttttattactataaattggtataatgttgtaaatgctaaaggaggtttttacaatgacaaatttagaaacttatttcaaaaatagccaacccttaaatgaatacattgatggaatgaagacaaatcaagataccgttctcagtatctatcaatcatttgagttaccagaagatgattcacgcatcaaaaaaataaaagagatgaattattctaaagtattagtaattactgaagactggtgtggagatgcaatgatgaatctcccaattctaaaacacatcagtgaagcattaaatttagaagtacgcgtgttccatagagatgatgatacaaaactgatcgatcaatatttaacaaatggtaaatcacgtgcaattcctatcttcgtattcttgaatgatcaattcgaacaagaaacagtttggggaccaagagcaaatgaagtccaaaaatttgtaactgatgttcgtgctgataaattaccgagcaaagatcatccagactatgcagatttagaaaaagaaacacacttagttatatcaaaccgctataaaactgacgcttcattttggaaagcagtttataattccatcctaaataaattagaaaataaataaatttacaataagacaaactttgaggttgggaaaatttaaaattcccaacctcaaaattatttttattaaatgtcttttttagcgacatataagatattcaaaatgaagaatatcactatagaacctaatgaaattacccattgccaattgctaaaatcaaagttagagctaatcattttatcagttaagtaagcaaaagggatataatcaaaagcatctaaaactttttcaccgtatcttgggataaatgtaataaaaggtttaataaacggtacaatgagtactaaaaatacacctaatgaaaatatcattgctgttttttgtgatgcaagtgtgattaagaataaaaacaagccaaagaatagtaaaaagattaggaagaaccataaattatctacatatttagaaaacgccaaattttttccattactagatgcctgcacaacaatcaaaatcacataatgaattaatgcaaataatattgaaattaaaataattgaaattgttttcgaaataatgtatccaacgcgtgttttaactttactcatatatagttgaattgtaccttgtgaaaaatcacgcgtaattgtcttaacaacaaacattaatccaattattaacaataaccattttgctgcagcaaatacagatccatagacaataatatgtttcgggttatccatcgaatttgccataagtatactttgagttgcaatcaaactagatacgactagtatcgctaaatatgttaaaggacttttaaatatactataaaaatcatacttaactaaatttaaaattctcattatttatcacctctttgatttatattgaagtacgtatcacgcaatgaacttttacgtgtttcaatatatttcggataaatatctaattcagataatgcttttagtataacttgataatttttttgtgcattgatcattaaatgtccgtctgctttgtcgacattttgtaattggaaatgctctgcaagatatttttcagttctatcaaagtctttatgatcaacagtaactatcgttgtgtcagatgcaacaccttcctccatgtttacatcttgaacaaaatgtccgtctcttaaaaatacagctctatcacaaattaattcaatatcttctaacttatgacttgatattagaattctcatatcaagttcatttactaaagacttaattgtagtcagcacatcaattgagccatctggatccataccatttgtaggctcatccaagattaaaaatttaggtttattcattaaagatactgcaattgctaacttttgcttcatccccattgaatatttcttaactttctttttaatataaggtctcataccaaatgcatctataattttgtctgtgtatgctttatcaaaacccttacctaatacttgtgcaaataatttcaagttatacaatcctgatttattatcatataatttaggatgctcaattaaaaaaccgatattatctgcattatcaatatctacttttccatcaaatttaataatattaccattcattactttcataacggttgttttaccaacaccgttttttcctattaatccgacaattctactatcgccaaagtcaaaatcaatatcatttaaaacgacatttgagccgtatttttttgtaatatgttctaatttcatcgactgcctcctttaaattttctagtatttattttattgagctgtttaaaataattaacaataagtataacaatgcttataattagaaaaccaatatttaaaatatatgaatataaatctgggaatgatgattgacttagaacaaaataattcaccaatactattgcaattgaaaataaaaatggaactaaaatgataatagtaaacacgtatataccatatggcactttgactctacgcaattctgtaaattgactaaatgcaattggtatagacaagaagttagatatgacaaatgcatatgcagttgaaaaatagattgaatttggttcaatcacatctgcttcataagcatataaactaataacaagcgttccaattaatgttaaaacaatgcatgtaatatagttggcattaagcaattgtttttttgacactggtaaactcatataaaaataatatgaatcattaccacctaatctacgattgagtctaaataagtgaccagcatctaaaatccaaataatcaatattgttggacttataaaagattgcaataagtaaaagaactttgttgagtcaagcattatataaaaaggatataaggttaataatagaacatagatgataagtgtatatcgtcgtaatttaaaattcctaattaacaatgccttcatttaaaaaccttcttccatcaatttgatgttttcatgatatttaggttttctcttttcaagataaaccattaagttctcaatagaaggtgtagtgatattcactttatgacctaaaatttctttaaatacttgcgcatgttctgttaatcctataaatcccgtacgcttatgttcttcataaataagtagagatgctaattcatcatcaaggtcctcaatagcaccactcacaacttgatatctttgtaacagttgttcttttgaaccatttaagataacttcaccgtcacttaagtgaatgatataatcagctattttttctaaatctgagataatgtgtgtcgacatgaatattgttttattttcatcaattaattcttgctgaattatctccaatagctcatttctagctaagggatcaagacctgaagtaggctcatcaaaaatatacaattcagcatgatgtgaaaatgcaactgctagtgataatttcattttcatcccagtcgaaaatgtttttattgatttattgattggtaaatcgaacttttcaagataaaattcaaatacttgatggtcccatttacgataaaaaggggcaatcattttttcaagttgcttcgtagtccatctctcattaaaataattttcagagtaaacaaacccaattctattctttaactctatcggattgagagccatatcctcttctaatactctaataacaccagtttgtggttgatacaaatccataattaaccttattattgtggttttaccagcgccatttctaccaataaaaccagtgacgaatccttgaggaactttgaaagagatattctttaaattaaactgatcacttgaataattaacattacttaattctatggcattcatgatgattcctcctcataaatgaacgttaaaatatcctgcagttcctcaagtgacatttcgatggcttgcgcttcattaaccaattctttaaccaaattttcaatggtaaaaaattgtttctcttttaaaatagaactatcttgctccttaacaaaggtcccttttcctctaattgttgtaacaaaaccgtctttctctaaatcttcataagcacgtttggtagtaatcaaacttacttgaagatctttggcaagttctctcattgacggcaaatgctctccaggagcaacatgtccctttaaaatattttgttttacttgttgcttaatctgttcataaatcggaaaatcactattgttttttaaaattattttcatcaacgtccccctatcaacttctgtatatatacaatatacacaatatacacagttttgtaaatatgcatgtctcattatcaaccagtcttcagaaataacactgagtattgtattactagcagttgaataaaataaaatgaaatgacactaccatttaatcttgcattgtctacttcaataaaaaagactgctaaaacgaatgtctttaatctctacgtgacaaccgtagcgtcaacataaacaatcgttttaaacagtcaattctatttactatttttacgtcgatcattacttctacttataaaagcacaaatcataaacataatcgctgctaataataattttataccttggctttcatgattagttgcttgtaaataataaccaataataaataaaataattgcaagtactacaaatatttttgttagatgtttcaatttatttcacctcaacatcgacattataacaaatataaatttttttaataagttattgaatttcaaaagttcaaggtactaatcactttcaactaaaatagcgcaacaaaaccattcaatcaaaatgattattgattgcgatatattgtgttcaatgatattatttaagtgtatccacagaattatactacacaaccccaagtctggtaccagcagacttggggttatttatgtgtgtaggatcattttttatttttccatttcagttctaaccaaagtcgaaaaataattagtaagccacctgtaataagtgtcatcatcccttcttgccaccacatcattacactacacctccgttcgactaaagtatcatactgaaggatgacctacacctattctaacataaaaacagaacatatgttcgtattttggcagcagattttacatattattcgttaattcaccaacaacactttatctttggtataattgaagataatatataggcatacaatttttttaaagagaggttaagcaataatgaatcctttagcccaaagcttaaatgaacaacttcaacagtcaaatgcaactgcctttacaatgttatctgacttaggtcaaaatatgttttatccaaaaggcattttatctcaatctgctgaagcaaagagtacaacatataatgcaactataggtatggcgacaaacaaagacggaaaaatgtttgcatcatctttagatgcaatgtttaatgatttaactccagatgaaatattcccttatgcgccaccacaaggcatcgaagaattacgtgatttatggcaacaaaaaatgttgcgtgacaatccagagctatcaatcgacaacatgtcactaccaattgttacgaatgcattaacacatggtttatctttagttggcgatttatttgtaaatcaaggtgacactatcttgttaccagagcataattggggtaattacaaacttgttttcaatacgagaaatggtgcaaaccttcaaacatatcctatctttgataaagacgggcattatactactgattcacttgtagaagctttacaatcatacaataaagataaagtcattatgattttaaattatcctaataatccgacaggttacacacctacgcataaagaagtgactaccatcgtcgatgcaattaaagcattagctgataaaggtacaaaagttatagctgttgtggatgacgcatactatggtttattctatgaagatgtgtatactcaatcattatttactgcattatctaatttaaattcaaatgcaatattacctgttcgtttagatggtgcaacaaaagaatttttcgcatggggattccgtgttgggtttatgacatttggaacgtctgatcaaacaactaaagaagtattagaagccaaagtaaaaggtcttatacgaagtaacatttctagtggacctcttccaacacaaagcgctgttaagcatgtattaaaaaataataaacaattcgataaagaaatcgaacaaaatattcaaacattaaaagaacgctatgaagtcactaaggaagttgtctatgctgatcaatatcattcacattggcaagcctatgactttaactctggatactttatggcaataaaagttcatgatgttgaccctgaagaacttcgtaaacatttaattgaaaaatattcaattggtgttattgcacttaatgcaacagatattcgtattgcgtttagctgtgtagaaaaagaagatatcccacatgtatttgattcaattgctaaagcgattgatgacttaagataattaatttcaaccaataatctgatgagtatgactcggattattggttttttatttttaaaattattccttctttcaaagtatcataagatatattttattcagcaacttgtcaaacactatacctaattagttttatacatctctcctaacaaaatcaaaaaatcggacagatgaaaagtaaaaaactttttctatcagtccgatttattatagaaccaatttatataacttttggcaaatcacttcaaacattcaagcatcacatctctacaaatgtaaaaggcaccccacgattgtgagatgccttattataaaattaaagattagaatttaagttcaatatctacctttttaatgtcagttgctttaaatactctttcatctttatactcagtttttaagtctacatattttgacgaaccatttttaaaatacactttatacactgcgcgttcagcaagtcctatgtcatgtttagttatcccttgatcatttgccattgctgatttaagttttatacttaaatcattaattgtaattttgcttgcattatagaacacaaattcatttgaaactatgttttcaaatttatttattgttactgggaatttcacattattagatttatttattttttttgatttagtgtattgttttacatcaatatcaatctttttaatatctttggcactaaataaattaggtgtaaagatgtctgattttaaattcactacttgtttctttccatttttgaaatatactgtatattttgcttgtttcgcaaattttaagtcaagatcactgatgcctctttcactttttaatacagatttcactttgtcatttaaatatttgtaactaattaattgtttattcgaaattttaagttttgataaaattggtgttgatgtgccatttactgcaattgtatatggtacatagctatccgctttcgctttagttcctgttttaacatcaatatctatctttttaatatcttgaacataaagcagattcagttggctaatatttgaatttatgttaatcacttttttcgttccatttttaaaatgtactgtgtaagttgctttttttgcatattttaattcacgttccccgatacctctatcatgcttcaatactgatttaacttttttagagatatctttgtagcctacacgtgggtcacctgtaaattttaaatctgataaaattggtgttgatgtgccatttactgcaattgtgtatggtacatatctgtctgctttcgctttagttcctgttttaacagtaatttcaattctcttaacatctttcgcatgaactaagtttgctgtgtaattttttgaattcaactgtaagattcttttaccaccatttttaaaataaacagtataataagctttcttagcatattttaaatcttgttcactaatacctctatcatgcttcagtactgattttatttgactagttaaatttttgtaatttgtccaaggtttatttgaaaatgaaagattcgataaaatgtttgtagatgtaccatttaaattaattgaatatggaacttgatagtttcttttagctttattttcgatatgtttttttgtatctacgttaatattgatacttttaatatcacttgaatttattaaattcgctgtgtaaatacctgatttcaaatcgataactttcttcgttccatttttaaaattaactgtatatttcgcttgcttcgataatcttaaatcaacatcggtaatacctctatttgattctaaaactgatttaactttatcctctaaatctttgtaactaatattttgattcttattaaatgttaagtttgataaaatattttggcttgtaccgttcacagtgattgtgtatggaacttggtaatttgctttatctttctttttatcttcaacttgctttttagtatctacgttaatattaatagctttaatttcacttgtattaattaaatcagctgtgtaaatacctgctttcaaatcgataactttctttgttccatttttaaagtaaacagtatatttcgcttgcttcgatagtcttaaatctatatcactaatacctctgtctgattttaaaactgatttaactctatcctctaaatctttataactaatattttgattcttattaaatgttaagcttgataaaatattttggcttgtaccgttcacagtgattgcatatggaacatggactttagaatatccatggtgtaacgaacttgatgatttatctaatggcttagctgcggcagacgcttcattattattaaagtttgcacctgttgatgctaaaacacctaatgctaaagttgttgtaatcaatgacttaaatttcataaattatctctccttttttgtgtaattcgtatttgcaacttaattatagccagactttctctattttttgaattaactgaatattaataataaattatctttaacaataattttttaacactgttaaaagttcttttaattttgattaactaattaatttacaatacctaaaatgttgtttggttttgtttataccaagcttcaaacttaaatgtcataacaacattcatttcttaattccgattagatttgtcgattatatttacagcatctttatactcaaaaaacatttacttaaaaatataaattcgatttaataattaatttaaatttagttaatcaattttgcatctattttgttgtaagctatataaaaggagtgataatgatggtgaaaaaaacaaaatccaattcactaaaaaaagttgcaacacttgcattagcaaatttattattagttggtgcacttactgacaatagtgccaaagccgaatctaagaaagatgatactgatttgaagttagttagtcataacgtttatatgttatcgaccgttttgtatccaaactggagacttttaacataaaattacttatcattcaaaaagtaaaacagcataatatcaaggtttataactttatcattatcaataatacctcatataaaataaaattttagggactttttagggactttaaatttaaaattacaagtttaatagaaacatcaaaataatcacatgtttgtgtggaatgtacaccccaaaagctagactgaaaaatctattttttgaggtgtatttttataggtaaatataataaattagagtagacaactcagaattccaattttataataatattgcttgacatatcaaactagatagtactattttgaatatattattataatcaaaaattcattgtaaacttttagacaaaaggaagtaataaaaacgtgaaatttaaaacaactaaagaatgtaaaagtaataatatctttaaaagaagtcaagaaattaataatagagaaagtgaaaagggttgtttatggggcattagcatgttgattctacttttcttattgattctgtttggaataactgcttgttcatcaagcattcactttattaattagatttttttacttggaggtatcatgtgaagaaccatacaaatataattaatatcttattagttatagtcaactcattaactcattttctaactctaaacacctcattttttaataattcagcatcggatttctgttttatcataggggctatatttttcttaatcggaatttttgttgcaatatacggtatgaagcgagcaacatattggttaaacttattgattttatttaccaatattttttattttctacacttctgtgtgttacttttgttaaaatatataggatttaaattatttatttatgaagggtgtgtattgttatttatctaatttatagtctaattgtctatttcatctgcattataaattttttcataatggctgcaccattcttaatgactaatgctgattatgtatggacgcctatgactacagttacgttatttattttgagtttgattattttcttgatatttataaaaacaaaagatgtcgttcatttaacaattttcatattaaacttacttttttcaatactttattgtttgcctatactgttttatttatgaacacttttatattatctagaaaattaaaaccacccgtaaaagggtggtttttttaatatttactttttagtgcttcgtcaatttcgttataaatcttttgaagttgatattttgcttctgacattttcttaaagtcttttgacttaagagcatacattgcttttagacctgaaatttttatagttcgcttataataagtgtttaaacttccagtagctaattcattaacatttagttcatctaataacgattttaattcattagctaacttttcgttttgatattcattcgatgttggcaagcttgtgctagcttgtgcctcatttttatctagattagttactagtggtgatgctaaaacgattgctaaagttcccgcaagtatagattttctaattttcattttttattctccttagtaattagtactaatttattttaatgactaactaaaaaaagtacattaattattcattaactatatagatcttcttattaaatgaaaattaataaattatcaaattgacataccttattgtatttatagaaaaacaaaaaaaggtaagcaccgaaatgcttacctacttcccataaacaatataacacatatacattgatttggaaagcgcaaaaataaatttaatatactagcccgaaggggagcaatacataaaaaatgaaaggcgctccttgaaaacgcccaaggtaatattaacataaaatggctactattgcattatctaattttatttaattaaaacaaatatatagcaaaaaaaaactagcccgaaggctagcttatgaatagatgaaaatttgaacacattgctgtgtctaagataaatatagcacatattaattactattaatagaaaaattatagcgttttttagattatttcaatttatcgagaccaaattcatcaaaacactaattgaattttaatttttagttaaaaataattaatcttttattaatttcaagttaattaatatatttcgtcgattagattaaactcattttaggaatttcgcaaaactaactataaatttaaatatagaatttaaggagaattaacatcattatgaaaaagaaattagcaacaacagttttagcattaagttttttaacggcaggaatcagtacacaccatcattcagcgaaagcttttacttttgaaccgtttcctacaaatgaagaaatagaatcaaataagaaaatgttagagaaagaaaaagcttataaagaatcatttaaaaatagtggtcttcctacaacgctaggaaaattagatgaacgtttgagaaattatttaaagaaaggcacaaaaaattctgctcaatttgaaaaaatggttattttaactgaaaataaaggttactatacagtatatctgaatacaacacttgctgaagatagaaaaaatgttgagttactaggtaaaatgtataaaacatacttctttaaaaaaggagagtctaaatcatcttatgtaattaatggtcctggaaaaactaatgaatatgcatactaatagtagttacataaattaaaaggtagatatttcttttttatataaaggtttggcagacatttcataacttgccaaacccttatatatctaattatcaaactgcactaaacttaccaaaactgcttattctattacctgccttgtctacctctcctgtcgctatataacgacgttgtccactattagcaatataagtaatccatctatagccattaatgcaatatgcgccgtcatatttgatagttgcgttattgggtaatacacctgtaattcttgaattagttgaatagccatccctcacgttattacctttaacattggcaactgtgtaataaccagtctcttttttatacggtacattgtttttatcgagtgtataacctgctggcactggtgaattcttttcatttttagctggtgttttaacattactgatacctgatacacacttccaataaaaataaccacaccatttaagatgcggtgtagcgactgtaatatttctatgttgttgagatatatgtatcgagtgaagggcaaaaaggatatcaattgcaggataagtgttaggttactaggccacttaacaggctatatagttcactcctactatatacagttaattataacataaaaagcaccccgtaaactattatacgggaatgctaaagtcatatatactacgagggagtagtatgaaaactatgctctctatcataagaaaaaacacccagtgacatgcttgggtgaacaaggatagatgtaaatagttgatgcatgtgtaacacatcataacaaaaaactagcccgaaagctagctataacatacaatctaaaaagacgtcccttgaatacgtctagaaagattataacataaaaaaataggcaagtaccgaagtacctgcctaaaaaaggattatccactttttcatcctaactgatttctccccataagtcacctaatatctgattaggtggggaagaaccattcgtgcatgaatgagaatttgatgaaagataattttcactacacatattcaatcaagacattgctttctataataaacaactattttgttttatttcttttctataataacctttgtaattaagttgaatccagggtttttaatatgctctgataaatctgggacaacaaaacctttttctgttatagggaaagacttcgtttcttcttttttcttattcttatcataataagtgacttcgatctttgcgcttggatctaattcaactactctaaactctttatatgctgtcgcatctaatgcccattcgacatagtattcaattttttcttttgtaagtgtagtcccaggtttaataggaaactcgacataatgaggggatagcaattcatttcctttaccatcaactccagtcacatttaccatcaaatacgggcctgttggttcaaaataactcgcgtcatcgccttttttatattttcctttgtcgaatgaacttgatgcacttacctcattagtaattgaagaaaatgagaataataacaataaaacagttaaaaataataaacctcttttgagcatggcgcttcctccaaatataatatatttgtttttatttatctctttttatagctaacacccttatttaagatgataaatatcaacaacttcattttatattgagaaaatattaaaaatcaataaaatattaaaagaaactaaaattacattaaaaaataattaacaaatatttaacattttaacctaagaattaaaacacttctttcacaatcaatctctcatgccatatccactcattatgattgttccaataaatgcgacaccaaccatctataatttcaaacacatatattaatgttccaggcgcgtatacagcctgtccaacatcgaatctatagttagtacgattatcaccgtatctagtggctgaagtagcacctaagccgtcgattttcgcattaaaataagcaccttttgaccatttaaggttataaggcgctttacttccaactgttattttacttgcagatttaccgactgctttttgagcaggtggtttaactttatttgtgatcttattcattaagccctcacttttatacttaggtctaataaagtgagtacagccgtaataattatcccaacgtaactttgcaggcgtatttgcgttaccgtcatagttctgttccaaaattaaaaattggtttgtattaccaccattaaacactaaaccaatatgaccgtattgtttatatattcctttggtaaatacagccacatcacctatttgtggaacaaacgatggtgtgttttcatatactgttgccatgtttttaaaatcgttattgattgcatcttttgcatttccccacattctaatttctaacaaccaataaatgtaatcaactgctaaatctgcacattggtaaccataccaaccgtcaaaatcaatatatctaccttgataccaacgtaaccttgctcttgcttcactgtatgttttcattattttacctcctagtattttcttcttggttcttcatattctaaagcttggtggctatcacctatacctttagtagtcgggtcttgaatcacaccagttaatactaaaaatcctaatatagcgtttaaaccgtctgttaattgctctgtataaacttggatatcatacccaatagcttttgcgatgttttgagcaaataaaaagatagctgacaatatcgctacccaaaatgatttttgtttcattctaattttccaattaatcatattcttatctccttttatccaaaataaaaagacgactaataagccgtctatttgatatttatattatggtgtgttaatttatatatataaaaagggcaacatgcgcaaacatgttaccctaatgagcccgttaaaaagacggtggctattttagattaaagattaaattaataaccatttaaccatcgaaaccagccaaagttagcgatggttattttttattgcttaattcaataagcttgattactagacctatgaatgcaataaggaataaaccaaactgcaacatggtactaattgtaatcattaggcgtctcctttctaaagatttcagtaatgccaccataggcaccacctccttatactcagatagccaccatctatccaacttgctcacttctgcatattaccataattacaacaataaataaaaagtcagtaccgaagcactgactaaaacttatttacatttaccgaaccaaaaacatgtccagaaactataaccaaagattagtttaaacattttattcacctctcttatatgcccataagcatacgcaataatgctataattagcgacccaaatattgtcccaactaaaccaagcacccacattttcatatcacgtatgttcttatcattttctttcttattcttttcatctatttctctttctttttgaatagcatctaaggttttatctaatttaatgttaacttgctcttgtgttttttgacctaatttaatttcgttgagtgtgctgagcattgttttatcattctcttctaaccttctgatgcgccattcatgttcgtgttttttgaaccaccccaattcagtacacccgctttctaaaagaataaagattatgagtatctaactcatagcttttcatactgtttcagtgttaactgttacctctggagataaatctgatctttcaactacttctttaactactttcacacgttgttttttgttagttaattgatataacaaatttaacgtctccgcaattttcttagcgttttcttcagatttaaaatcttgagcatggttaaccatttcagaagttgtaaaacttcctgtgaaatcttgatatactacacgttctgtaccttctttgtcgatttgtactaaaataaacctttctgtattgttgataatttcttttgccataattaaatgacctccttaaatttttgtataaaaatagtgctaaggattactcttcctcagcacattgttgattttctttattttcttgtatatacgcttttaacatcgcgttttcttgtgttaacctcataatttcctgtgataaataatgaattgtatattcaggattagcttgtaatccttgtttgttatcctgcattctttgactcctccaatttcttgattcttagttgttgttctttgataacagggataagatgaatccatagacgatcatacgctataccttcaatttctcctttgtcatcatacgtgacaaactcttttaatcctaaattctccacctcttcagcaatcaaacctacgtatctatcaagtttataggtgtcttccgataattttctatcttctctcagctctctagctaaaatttcagactcagctttatcaaaccacgttctaataggtaagttaagaatagcttttgaatgttccagttgttcatctctatcgttatattgattttcgatagataacttgtatttacgcgctgatgtcgaacgcccaattgtgccagcagaagtaatatgcaaattagctgcggccgaataagtacgtctataaattgagttagaagctatcctatctcctgcatcatctgaacctacagacagtaggtctgtactctgtatatgaatatacctattaccatcacgtcgtttcagcatattaaatttgccataccctgcttcgattgttgtatctccacctgttgcatatcgtccattaacaatttgaacaagacctttatttctttctttagaaaacctgatacccgcaccgtaatcatagttctcatcagaaccaaacataatataaccgtcactcgaataagcattatctgcattagacagcgtgaatgcaaatcggtttaatccaggcactttgtctgtgtttggatataaatacaccggtgcctgtttgcttttgatattcgatgaagcgtaagactccagaacaacccgattattatctgacgttagtgcaacgacaccaccataggaattgattgttatgccattcataccgctatcactgtaagttttatcccaccattgaatagtaccggatgaacctccgtcttcgccttctccatcaatatatgttgaaataccaaaatgtgacatataaagtgaaccgcctgcggtattatttctaaaccttagatgtccatctttaagacgtgtgaatatatcatcggttgatcgtttgcctttccaagttcgttgcacaataccacctagttcaatagaatcattctgtatttgaacatatctgttattgttaccgcctttaattccaattctattaacattgatatcaagaccctctcttgataaattaaggctgttgacaatatcggttttatctactttatctcgcatattttggataagaaggtttatttctctattaccgttaatatcaattttatcagcatttaatctaataccacgtggccccacatttaaagcttgagccactccgttatcatcatatctgattgttgttccatctgtaacgttttggacaatctcgtttaatatatttgaaagtgtacgattggttgcattaaactcttctttagtagttcttaatttgatttccttaccattttgtataatttgagaaccatagcgagtcagtgttctcctctgtgcatctgtgctttctttgaccttgttgtctgtataagcattagctttcttttcagcgtttctagcctttagttctgcgttttgttttgcctcttcaagtttagcttgagcatcttgtatagcgcgttgctcttcttccgaaattttaccatcagcatacgcttgcgattccttctctttaagattatcttgagcatcaatgtatgattttaaagcttcttgcgcttcttgatttgcttgttcaatacttgctttaatctcaggattattggacaaatcacttaactggtcatcagtatattgtttttgttcttccaatccgttttgatattcgtttaacgtaactttatctttgatttcaccttttaaagtcgttctctcagcttcagcagtatctaaacgttcaacaataccgtctttgtctgttttatagtccgatgtttttacatagtcacgtaattgttcttttgtggattctctagctgcttcaatagctgatttaacaacattaggttctccgactaactgcaaatcttcattcaccgttaaaccaaattttgttgctattatttccaacgcttctttatatttttcatcagtgtattgtgactgtaataatttaaatctatctgaaatggcgattttgacatcttctacatctgtataaacatcttgtaatttctttctatactcaagaaataaagtttttgtatctaccaaccgaccaatcgttgcagtttcgggtgtcatagattctaaattatttttaatttgattataaacatcaatcacagcgtctaaacttgcttgtaagtccgctttcaaatcattatctactaagtactcgctattcagtaattctgtagcttctgacaaaagactagcgtgttgtatagataaattaataaaaatattgtttaattcactgaatagcgctttctctcttgttataccacctaatttttcaacatcatttggtgttgcttcaatccatcgaccattccaatatctacgcaagacagcaacatcagggttacttgtatcataccaaagcgtatcattgactggattttctggcggtgtatcacttttatgaattttgcgttcaaagtattctaattcaccatctacaacatcttttactatagtattgatattgctaatattgtcgtttaatttttggtgtattaggtttaatcgcttgttaaactcttctcgtaattctgattctttgaactctttaggttgaccgaatgtatatgtgctattttctgaaattatgttatattcttcagcaataacttctgcctctacatacaatggcgggttaaaatctctatgttttactctgactgtatcgccaattgatataatctcgtgcggatacgtaacttccaaatcagtagaagtaatctcatatgacataactgccgacttacgtttatttaactctgttttggctaaagaacttaatcgtgtttcattcatattttgatcatctgattgtggttcatatatcccccaaatatagcgcataggtaggttgaattgactttgcgcttcgtcatctgtcacaactagctctaaacgcttccctttgtcattttcaggtcccacagcaattaatgctgttttgatttctgacatatcaatcttcctagttaacccgactaaatctttaccatattcaatttctttacctttgaataagctgtttttctttttgagtactacatatctacctttgacggtattagagctaagctcaatataaaaatctaaaaccattttataggttgtacataattgctttaaaacttcatatctagtttgataagaagtccatgacgtagtacgtaagccatcgtattcggtttgttcagaaacttcccaacctgtatcgctcaacacatctttcaatgcttctgaagttgtctttttctcaaattttcctggtgcatacggtttagctgttgttatatcagcaagataagacgctatacattctatctctgtgtagccgtccatcgtatcttgaacccagttaataataaattcacgccattgtttgtttgaatcccttataataacacgatgtcgttcacggaacttttcagctctttctgatgatatgagcagttcaagcatttctgaattgtcattaacattacgtttatgaatcgctctaactaaggaagggtcatcagtagaaaggaaatctataatcttgtcgttaaaatctaaaacatgtatcacactctcatctcctttctataaatatctatcttgccatttaaccgtcgtatcaaagacgttttcaggttgtatgattaattcactgtacccagaatcaacattgaaataattacttccaaacgatttctcgctcaacattggttcctcattgatgacaacactttttgcttgcatatctattttcactaaatcacctttttgtataatgacatcccttgcgcctttcggtttcggtagaatctccgtattgaatgaacctaatccattcatctccatccacttataaccgttatacttcgcactatagatagctatgatagaagctggacgctgataaaacttaccgccatctatccactctttctcatccatatcaataggtttacgtctatctgggtctttaatgtgatcaaatttccaagttttaatagaaaatttattacctactcttctgagccgcatataaacaacgattctgtccaagttatacattatcggtttattctgatagtcgtatatctttttggggtctcctttttggttatacaacgtaacaacaatatgtcctatttttctatcatgatatttattttcataaccaatagaagcaagtaacttaccatcactatcataaatatgttgtgctgttcttccggcacctttacctttttgttcaacaatacatttataggtaatttgaaaatctgtcatcgctttagggagccctcgtttcgtgccagcaccaacccaaccttttgcatcaggaaaattagttgctttatatccttcgccaagattggatatcacaaagtcaccgccgaccttaccacctaagtcattacttggaatatcttcagtaatcatcttagtccaacctttgaaatcacgaaactcactatgataaacaggaggcatgtaatccttaacttctttggttacctcatcatcaccaaccataaaataatcttcatcatttttagtaatcataaagtaactagatggtttaattgctcgggcttcaacaattaaaggagtgtcagcagtcccactatttacaactgaaacttggtctgaaatcgcagtatttttatttcctgttactgaatatttgtaagggtctgttagtactactttgatagtgaacttaacaggtattgtaaattctttgtgcagctttattggtccttcgaaataagcgttccagtaccaatctttagatttgaattgtaatttaacttgttcctcgtagttaaaaaactttactaattcattcaagacgtcatcatgtgttttaatgccgttgtgagataaatagtcattacgtaccaccaaaggtatatcaaaactataagattcaagcctacgccctttatatatagaccccgaacgtccatctacattttctgtttttaaaacataattaaaagagggtatttcaaaccctctttcgacatacaaccaaggaattgttttgttgttcactttaatagtgtctatcattgaatagcaattcctccttttctaaactttacttttgttgattcttgcctttctcgcttttctatagacgcgttcacctttttatcaaaagcgtattcgtcaataatcggctgataatctttatctgcaatcacatcgttagattgtgctattttcagtaataaagctatttgttgttgctgttgttcaatcattttcaataataagctaggatcatcaaacccgtttaagtctgataattggctaggacgcttatttttactcgcttttttccctcttacttctgctgctgcataatgcaaaatcttcattgcatcatttctacgagctggatctgttggaataatccattctggatgaccgtcttcacctaagttataccaaccatcaaaaacttttccacctgtagcatatgcgtaatcaccagcacgtttaaaaccaccccaaccatatcgtctaacaatgtactgcattgctgagataccttgatgtactggattattataattagtgtaccctcgtttagcgttagctctaaaagttgagccgataatttggaataatcctctagacgggtctcctctttgagcattaatatcccaattattcactgcatttgattgatagttgctttcacgctttgcaactcgcatcatctggtcatgaatccacttacctttataacgtcctcctaaaatactttgcgcttgtcggattactcggctggcataagttgcaccacttccagaagtagcatcaccgccaccaattgataacctaccttttttctttgcatttcttaaatatggttcagggtcaaaatggcgtccgtttctcctcatttcaaaatgtaagtgtggtcctgtactaaatccggtattaccagttaaaccaacaacatcgccgggctttaccatcgtgccactaggtggtgatttgctaaagtttttcaaatgcgcaaatagcatatcgataacgccactagtaatttttacatagttaccataaccaccagacataaacggcattcttgtaagtctaccacccataggcgttctaacttcttgatatacaaatggaaaatcgacaccttcatgaaatggtcttccagttgcagcggtataagctgcggtacgtccataatgataattaattttgtcagggtctaatattccgccgactaaatcgccaccgcccatagcttctaaattttcttttatccaatcagtagcacttttcttaatcttagaccatgcagcttttgttatgtcgcctgcaattcccattcctttagttaaagaattgaaatcaattccaaaagcttcaagtatataatttaaaagttttcctggatgttcaataaaatctaaaacatcgccaactttatcgccaagccatttggtacctttacctatttgatcttttgtccagttaaatgctgatgatgcaccggacttaatatctttccacatagtacctaaactaaatcttggaagagttccgtttaacattgaataagtttgtgcaccgttatatacttttgagcctttaggtaaataagcagtagtatctgtatttggtgtgattacacgtttaccattagggaattcaatcatttcgtttctaaaaccatttggaccatttccgcgtcccttatctccaactgtagcgaatgtgtcacgtgcaatcttaccgttcttaactaatcttgtagtagtatgtgtgtgctctgtaccagtatgtaacttaggtattttatccatgcccaacttaccaccgacccagtttaaaccgtcgattaatttattaagtccttttttaatagcatctaccataccgccgatatgacttttaattttgctgataatactttgtaagccgtcacgcatatttgtaaaaattccacgtaccttactccataaacggctagcaattcctaccgtattatctttaatggaattccaaatatttgacatccaatttcttaaattactaaaaatttctttcgtcgcattccataaattagtaaattttgatttgacgccactaaataatgactgcgcttttcctatcgtattcgtacggatactactccaagtattagataaccaatttttcatattcgtgaaaattgatttgacactattaaataagaatccaaaaatactttttgtcgcattccaaattgctgataaagatttactgaatatactttttattacgtcccaaatacctgctattaatccttttagcaatccgccaaagtacctaacaacgccaagtattttgcctacaaaccataattgaattaaattccatattaattgaacgactcctttaagaatcataacaatcgcatcccaaactcctcgccaatctccagtaaataaacttgagaagaacttaattaaacctagtatgatatttaaagctccttgtatcacaccttttatattctcccaagtactgacaattaaagctttaaccgccggccaaataaattgcatcacttgccaaatcgcgaacatgattggtttaattacaaaatttataataaattcaaatatagctttgataaaattgcatatattttgaagcgcttgaacaatagaaattccgttttcattaaagaatccattaatttgactccaaatatctttagcaaaatcaactattgctgatatcgcttgtttaaagatgtttttaacagaatcaatgaaaggttgaataaattgaataaaattactaaatgtttgtttaacactttcaattgcaccattaacaaaatttctgaaagtttcagatttcttataagcaattgtaaatgcgactgctaagccagccaaaacacctaatacaatgccaattggaccagttaaagccgtgaagacagttcctaatataggtactttagtcgataaaaaactaattaatccatcagcctttgcaataccagctaatagtggggctaatacagttactgcattgccaattgtacttataaatgcgcctaatccaaaaactacaggaccaattgcagcagcaataccaccgaaaataacaattgatcttttagaaccatcacttaaattggaaaaccaatcaaccgctatagatagctttttgattaattcttccattactggtgcaaacgcactttcaatagaagtccatacatcagcacctactaattttaatttattcattgctactttaaatctttcggagccactttcagaatctttaaacgtttgatttactgtgccttgggaatcttcgatagtttttaaaaattcttgataactaaaacgaccacctttaatagcatctgctaaatcaggacctgcttttgcaccaaatgcttcaatcgctaaacttgttgcgctagctatatccggcgtcttttcaatttctgctaatgtcttcttaaattcttctcttggatttttaccagctttaccccaattggatatagcttttttcaaaccactgaaggctatttcagtattaacacctgatttctcccattgagagaataaagcgattgattctttcatctcaaagcccatagccctcattggagcaccgtatttagtaatgctatcagctaatgtatcaacacttataccgctagcctgtgctgctttcgctaccatatcaagtacactttgatactcatcagcttcaatacctgcatcacccattgcacgcgtaattaattgaacggcttgtacgccttcagaacctgttatgtgactaaatttcaagaatgactctgtggcactctcaagttctttgccagtgaaacctaaccttgtgttaacttcccctaaaacaccgcctacagtctcagcatctgctggaaagttgccataaacatctttaaatgaattctgcaacttcttaagctctccgccggttgctcctgttgcttgggtaactgtatctaaacctttatcaacttctgcaaaagcttttcctgatgctgctgcaatacctaaaacaggtgcggtaacaccaatcatcatacctttaccaatagattttaaaccatcacccatttttgttaatttaggtcccatactttcaaaaattttactggttttcccccagccactttctgccattctttgagcttcaacttgggcttttttgaactcttcaaactcagccgatgttttttgcaattctctttctaaataattcagctcatttgcttgtttgttatattcttgccgtaatttttgagcttctgcactgttttcaccctgttcttgagataccttgtcatattgcttggctaaatcatcaacatttttcttataacctatgatagttccgtcaagttctttaatcctttgttggtaactatcagttgatttttcggtatatttgaagttgttgcctgttaactttaagtcagaatttaaagttttaaagtttcgtttgatttctgcaaatgatctatttaaatttgctgcatccaaatccaaacctatagataaaccttttattctttctcccattttttacctcctttctaaaaaagttcaaaaaaataaccctaaccaaacggttaaggttaaaatgcatcaattaaagcctctgctttttcttcagaaatgtcattgtttttattttgatatatggaaagtacataatgaaatggcatttttaaaacttcgttagcgtctttaccattttcaattaagtccatcatgagagtatccatatttttcaacattgctttatatgttaaatcttcaggctttatttcatgttctggataaaatttctagtttcctcagtttgctgaccttgagtaatgaaaattacttgttcacgaagtgcattcattccatcaggtgcatgcatacgttcttttaagtctttaactgtgaattggttatcgtaaatttttacaaccatatccatcaatctgtcagcgatttctcttggtttcatcgtgctattttcgtcctcaatatcatcgattaaatccattgcttcgtatacaatttcaaatgaaatgaagtgtggtgttaagtacgtttgtaatttaatttcatttgctttcgggtcttctactaattgaataatgttacgttttaattttgccattttataatactctccttattttcaaataaaatagaggggttgccccctcttatgcttctacatttattgttatagtgtcactcatattaccaactgttgctttaaccgtagcaatgccttgtgcttccgcagtaacttgaccatctctattgattgatacaatattcgtttgatctgttgtgtatttcaataacttactttgattagatggctctactacaacatttaaatcgtatgtgtcgccaactttaagtgttttaatgctatctggtatattaaccgactttaccgcagtttccgatgaagccggtttcgttacaaagtttcttcgttatcctctgtcacgtttccagtatattcttcgcctaaaattttctttaagaaagcctcttcgcctttttcaccgtcgccaccatgatttgtcatgttagctgagtcaaagatatatttacgtacagactttttattatcaactaaagggaaaagtgcctcaccttcaacctcttcacttgagaaatcccaatctttctcagccgtttctccatcgattttaggatttgtaaacataactttaggtaataaaactgttctaaatgtaccgtctctacgctcttgtctgaaccatacagctacgtaattgttttgtttaccttgtttctcttcgtaaacgccatcttcatcataatcttcattaaaaacaattttgcgaatctctttagggaacgcatgcatttgtaatgagattttaccttctccgtctgtattccctgattcaattggaccgccatcagcataagctgtttttagttctccaccagtttcaacaccaattttttgtaatcctcttgtttttgtaatatcactatattttaattccgcgccttctttcgttaatttagcgaaacctaaaccagtaatgttaatatacgcctttggcgcacttgcatgttttactgccatttaattttcctccttataaaaaatgccctcgtaaacgcgagagcttctatatgttttaaattcttctatatattccggttttccatttgaaacatttcccatttttagttcagaccataataacttttgaatacgattagatatcttatttcttatgattctcgcattatattcatcattgtacttaacaaaaacatctatttggacaatataactatatgcacactcatctccgtcagtataagttgtaggtattgggtcgtcgatatcgtcaataacaataaaaggtacatcagtatcttttacattagggtatttattgaacttaatattattgatatttacgtgctctctaataattctgtcttgactaatcacttcatgaactttgtacaaaatatcaatcacaattttttcaactccctttttagcgtctcaaaatacttattttgcccttgtcttattgctctattaacaccgcccatagctttaggtttgataaatttacctgtttctttttgaacgtgtccatattcaattaaatgtacgattttataacggtctttagaacctcgccaatgaacagtaattgtacgttttccgtttatccattcaggtttactaaaacttacctcattaattaatgctcccgtatcttttgagggctttagttgtttttttacttcttcaacaattaccttagcaccagctattaacgccttatcttgaacttttaccatctcttttatgccaaaacgtttttctaattctctttctaatgctttatcacctatcactttcacactcatgaactatatcctccacgaatcataataaagtctttattatccaaatctggtgatacttgctttatattcaaacgatttttgaaatatcttgattcaatttcaagataatgttcttcactgggtaaataatcaccttgcggatcacgaatatacaatttaatgtcattttgggttccgtttgagatagcttgttctaattcacgtaaccagacaccatcaatactcgcccaacagctatataataatttttcttctttttctccagcttctggaccattattttcagtatacttataaaaatgaacacgagtatttaaacgtttagttgtaattctaggttttttaaacactttcttcatcttctgatacctccattagagataacgaaaaatctattatttcaggtctgtaattatcgttgaagtgttctaataaatcttgataagcatatctagcgcgtataagtatcaattcttgacctattaaattctctaattcaaaaactccgcactgattttttatacgctcgtacgacatttttaacaactgctttaagtactcatcctctgaattatggtcaatcttttcaagtgatttaaatttgacaagcaaatcatcaatcgtcattgtcttcaccattcaataagtcgacgatttcacttttaaccattgaactagacgcttttttttgtaatgattcgcatagttctaataattcttgttttgtcagcttatctaaaggtacgatataaactttgtcgtacttatttttgatttgatttgtcaacaattcaacacgaggattgttatacccttcagctggatacaactcccctactttgtacttgtgttgattgtgctctatgtctttaaaagctctaacaactttaaatttcaccattttatcacctcataaaattttatagtgtttcttcggtaccttctaaagctggcttatgtccttttaaatctaatttccaaacagcagcaactttattatctttcgctttgccgtaagcaaattgttttgcagtgtataaatccatatcatctaacgcaagtgtttctttaaatttctgaacattaataccaccagctaaataaccatcatataaacctttaacgtacgttaaaaccttacctgcttcttggactgtagactcgataacattcaaattaaatggtaaagcagtaacatatacgccatttgcatttaaatgtgtatactgtgcttgaacctcaaaagcatcggacggattaacaaccattgttacattacctttaaccgctactgatttacctttctcgttagttgagtggtatttaaacacttgcatcaattcattaaccgtagcgcgcggattagcaaatgtaagcgtaccttgttcttctttctctggataagcaccctcagttaccgatacacctttttgtacttgacggtttaagccgattggttggtctttaccagtaccttttaagaacgcagtttcaagcgccactgcaaatgcttcttcgatttgaacacgaacaaatctttcaatccacgcaggaccaaaatcatttaaatcttttggtaaaacaacaaacgctgtcaatttattttgaattgctgtttcttcactgaacgcagcatctaattgacctttaatttcaccatagattttaccccaaacggctacgccagaagtttcagattttaagaacttcaaacgcaaaccagcgtttttaatacctaaatcagctaataacggatgattcgtcgtcaaatcttcaaaaattctatcaattgtttcttctggcaaaagtttttcttctttatagttaacgtttttattgatatccatgaagaaacttctttggtttgcactcaaagattgtgctgatttaggtaaactagaaactctttcagcttctgcttttgcttgtaatttagtttcttcaaatagttggttaatcatgtcaccgtacaattcattttgtctttcttgcggttcaccgttgtttactgcattaataaattcgtttttcgcatttgcgaatgtttccgataaatttatagtcattttatgacctcctattttttgtattaaaaaaggaatcttgaaaatccatttgctgatactttactatctgcaacatcgatttctgattccttttctttcatatttattttttcaattactttatttgctattgcgtcaatatcaatgttaacctctggcgttttacttaccaaagctgttacacgatttaatacatctttcgataacacttgtgtattgcttgctacaatttgcatattgtcgttttcaaacattttactatccgcaaaaccttgttcaatggcttcatcagcatttagccacgtttccctagccatcatttctacaagttcttgtttgtttttaccagctctaaccgcatatgcctcagccattatttgaccaacatgttctaatgtttctgcagcatgatttagatctttcgcttctccttgcgcaatacttgaaggattgtgaatcatcattctagcaaccggactcatttagatgtggtcaccagccattgcgataagcgatgccgcacttgctgctattgctgtgatacgaacattcactttgcctttatgagctcttaaatgtgtatatatttcactaccagctactaggttaccaccatttgagttaattataatatcaacatcttcatcactaaattctagttgtgttaaaacatctttaggacaagtcgaatccataccaagcatttcgtaaacccatttatcttcgttggaaacgatgacgcctttaatctccactttcatcttcatcaccacctttcaaagtgttttcatctttttctttttcatcattttcaccactgttagctttttcgtagtttttagtaatcaggtattcgtctaattcaggattgtctgatggttcttcacctaacataatccgcacctcattccttgtaaatgaaccagaacttacaagtttgtcaattgcttcagcatattgaagtgggtcttttttattcacaccgacaatttctattcttgtatctttcaaatacatgctttgtgttatgagtttcgcgtttaattcgttctgaatcttttttaataaaggtgttaaacagaacttctcaaatacaagcgtgttcttttccaaatcagctgtttctccgtaaatcaaacctggaggtataccaatcatcaacgcaacattttttattgcatctctcattagctcactcaattcagaaaaaggcatgttactattcttaccaccattagataattcctcataatcaaaaccttctatcaaaggcgcgattgctagttgatttttattaaaagtattgaataatttatttgtgaacgcttgtaatttttctatattcttttcgtcatatgcgctagaggcagatttcaaaatccctcttatttgatagttttttaattgtgcacctatcattcttccgaatattttcccgtaatcttcgaatagactttctacaaagtgtgtcactttattgttgttgtactttaaatatatgacctcttgcattgtgaaagtacgttgataagtataatctttaaccgttacatctttgaatatatcatcatacaaagcgtactcttctctgtaaaagctatctgcgataagtaattctttgctgtcacttactacgattaaaacctcgttatcataaattagtttatatataacttgttgccaaaaactatcgcttgataagtcagtatttggttttatatttaacttgtagtaaacatcattcttttgaattctattaccttccaatactttaaaatgactttgagcgacagctcgcgcaacaaattcaatacaactatcaatcgctaaacgtttcacatacgcttgttgtgatagatcttctatcatatctaaatcaagcatatatgttatatctttcctagttttaaatatcttttctagaatactcatgtctcacctcctctattagaaatctatactcattaatgcatcaagcgctttagacatgtctttgtctactatatcgtctgctctatataatgcgtgaacaaaagccatgaacccatcggtttttcttctattttcatcttttttaatatattctttattaccatcgggtttaacctttactgcaacattattagtaaaccaacgcatcaaaggattgtctccatatattacgttatgtttcgcaaacattgtatcgatacgtggtgcaagtaatccatgtattgcttttggatttctaagtacttcaagttttatgccagcatcctcaaacgcacgtcttacaatatcagttctataattatcagctatgactttttcaagcccatatttttctctagcctttaaaaaccaatcaactatatattcaatttcaatgacatcatcatctacaatggtcaataatcccattttttcccattctttaataggtggctctaatttgacatcatccaaaaacccttgtcttacaaaagaatgtcctaaccaaatataatcgtcgttctttcgaaatagtagccctacacttgcgaaatctcggatatttgcaaagtctaaaccaccaatacacatttgattatctaaatttggtatctctctattagtcgctagtatttctttccatggtgctattactttttcaaggtcaacttcaggcaaattcattcgcttagtcatgaattcaggcttatttgaacggttgaatggtaaatcgttatattcttcttcaatcgtgcttagcagtgttttagcgtattctgataacggtttatgtaacattgggttcgccttttcccacgtctgtctgtcatcaacttcttttggatcgtctaacttacaataaaaagcaaacaatctactatttttaaccttgccacttaatacacttgcaattttgtgcttcattgcatcgatataaccctctctaacaaaaccatcagtacttatataaaacgttcttctatttttctttttacctaatccaccacgtttgacgtttaccatttcaggaccaaagaaataatgaatttcatcaaaaataacacacccctcacgtccaccgtctttggtttttgtgtttgatgtgttatatcgaataaccgatttagttgcacggtttattatttttgctttactaacttcataaggagcttttggcgttttacccgtcttatttcgtttgttatccattaaaacggttctgatttcatcaaacgatgtttttgcttgatcttcactattagcaacaatggagatgtgatattctttaactccgtgtaagggcgtagaaagaaaatcactaatagcacttattagaccgtttttcccgcctccacgtcccatgaaaatagcaaattctgtaaagaaagcttcatctgtatttttatctataagaaatatattagctatgataaacctttgaaatggtaatgttggaaaataccatttttcaataaatttgatacaatcctcgattttctgttcatcaaaatatacatcatctcgtgaatatatatgtttttgtagataattaaagagatcaattctttctttatttaaaattatctttccttgtttccacaaatttatatattcatcaacgtatttattactaatcataggtaatcatcagatggcgtttctgtgtcttctttctcttcgggcaataaatccgataattgtttgattattttttgatatgcagcatctctagcattaaatagtttggctactggtctttccctttcatatggtggcgccttttcagattgagtaaataaatcatagtcacctttttcttttatgtcttcccacatgtaatcaagcattacacgtagccttgctgcttgaataattaaaccatcaactacttttaatttattgctaggtatgtctttatataatacttgcagcctttctttttctttaagcactaagttttcatcaactataatctccatttcatcacctgccttaaaatggttataagagggggggttatacatggatttttaaaattatcgcgaagtcgagcccctgcccgttccccaagcgttttgatcactttcgatttttttgacccgggggtatttaccatttttcatctttccatttattttctttttttataaatctcttttcttttttgttgtgacatttaatacacagtgtttctaaattgtttaagtcatgagcaaactccggatgatgttctagcgataatatatgatctacatccaacgacttacgcttgcttttgtcatatgtcgttaacttgccgtctcgcttacattgttgacattcataattatctctttctagcactctttttcttgttgtttgccattctttagacttatagaatcgtatacgttcgtctttagtcatcataatgtttcaccttatataacttaagtagtatcaagacgcatctatacttgatgtgtagtaatgtatttacaattagtttgaacatgttcatacctcataaataaaaagacacatcacatagtgatgcgcctcttgttcatgcgttgtattagcatttaataactttaaatattaatctgatactaacataataaactgttttaatgcggacttacatagggtgaaagtccgctacacataaccaatatacttcgctaacttatcgatcagtgcatttcttctacgcaatatacttgtcttacttgtaccaaagtaatgcgcgatatcttcccactcataacaaccaataggacaatcccaatatctaaaccttaataactcaagcgtatcctcatcgctctcatctatcagtctatctacaccattaactatatttcttaatgtattgtatctgttatcactaaacttctttattgcacatcgttcaatcggattacctggcaaattacttttgctagctcctgcattatctggttcatgactttcaagtaattcatattctcgcatcttcaactctcttcgatagttatcgatgtgctgaatgtattcttcaagctttttgatatcatgtttctcaatctttatcattcaatgcaatacctccgataatataaattactttttaatatcgttattcattcgcttcaattcaatcctgtattcttctaacccgttgtatcctttagttttaattacttcatcaagtagataatcattcatatatctgagtgcttgtatctctcttgcacgatcactattaatactgatacaaactaatagcaatatagcaaatacaatagtcatagtaatccacatcactcacttacctccgctcgaaagacgtaatcactcggcgcctctacatcatcattagccgtcatcataatatatacttgctcagttacatacttacctagctcatacatcgctagtaagaataatagtcttagtatttgtttaatcatttcccacactcccttatattttcaaacaactgacctaatttaataactgcatctcttttaacttgcgcctcgtacttctctttcgcttcttctttactctctgcctcaacaactataaacctttgattgctcttagctcgagttatgtgtgtatgcttgcgtcctgttgaatctttgaatgtcgtgactaagtattgtgtcacttccccaaaacctccttgactcgatataagatgtctttacacgtatccttttcctgcgtctgctgttccatcttgtctttcgtggttccttttcattttctttttgtatgcgtcaatgagttggtcgatagtatataagttgtaagctatgtctatcgctatcacaattgccaattggtcgggataaaattctttgaatattatctgtggtgtactaacaactgcgccttgagcaaattctttatctttaaaattaaacattttgtgaaattctgtatctttaaaacttgattcaatcgcttcttttatctcttctgatgacactcctacttgattcgcaatactcaaaccaaacgccaacatatccgccaactcatctaactgaacatctaacggcttacctggtttcttcttccagttcttaaacgtttccaatgtattaaaccattcaaagaattcaactacatatgcaattttgctatctcctaagtttagcgtcggtattctatcgtcgaactccttttgtatttgtaataactcttgtaactgatcgattgttaatgtgttattcattatcgttgtcctccatttgatctaaaaattcgtagaactcatttgttccgtctagtttgtccattcggcacaatataacacttaagttgatttcagctcttctatatatagctacttccttgttcgctctgctctcaatctgtagttcgctaagtctaaaacggtaaaattcgtatcttccaaacaattcatttttaagcgtgcgccacatgttctccaactctttgttgcgtttttctagtttatcgatattttcagaaagttttttgttttcttctctatagtaaaacgcctttgttctaaaataatgtattgcactttcttcgccagtaatagagtttactctctctactccatattttttaaagtaacttaacaattcctctctagtaggtcgtgtcattgtatcccctccggaatatttaataatcttctggcataactatatgcgccatcactatttaatccgttaccaaagcatgtatacatgtattcgtaatccttttttgttaaatgtttgccaatataaagttcgaaacctgtttgtaaaaaaacctgtgttctttcaggagacatattttcaatacaagatctgctaacccaatgaataaatttaacaactaaatctaatttgttagcgcaatcttttagtgaaaagaaaatatttgattcgctatcgaggataagctctttattttcattgataaaactgaatttaaagcaattcatcatttcgaacacttcataaataagattatctatctcatcaaatgcttttgcttttctcttaacttccgctatatccccaataagctcatctcgttgcttcttgtactcttcacgatcttttaatgctttgtgaagtttatctaataacttgttagagttagtacaaagatttttatattgttcatctgataaggtgaacgtcatctcataacctccaatagcatctcattttcaaaaatatttccaacaatttcaataatatcgtcattttcacttagtaattcagttacattgctaaaagttatataaaaggctccttctttaaactcgataaaacttacttctctcgaataacaatcttgaacaatatccccttcataaatctccacaccgtgcacatctttaaatcctgtgtattgtaatagttttacttcattgaaacttttataacctgttgaaatcaaaatgtacccactattaaaatcgatttcgtcaataatactcataacttttttatctttatcccaagctttaaatttcaacatcatactagcaactccccatctttccagattaacgtcatagttaggtcgtcgtttaagatatagtatgctttagtaggaaaaaatttgtcgtcttcaaaacgttcgttcaaactgatacctttgtgtaataaggatttatagactccttcttgaatctcatatacctctaacaacctatcaaacttagtctcttccgttacttctttttcaatatcaactatgaaggggatatcaattggaataaaacttgacgtcgaacacttatttgtatttggatgaaaacgaacgaatccatcactaaatcctgttgaaaaaaatatttttccttgtgatagatccggattttctcgcgcccacttaattaattcatctagtctcatttcttttttactttgattttcatttttacatctccttaaaataaagttagttgcttctgttcctcatattccaaaccatgttgctttatatatatttcgagctcttccgctgtatcaaatgtctttttcacgccttgccaacctggtacgatatgcccatgaaagtaataagtgccgtttactacatggatatgagccactcgctcgttatcctgatacagatatctcttagagccgaaaaaatgttttaagtattctttacgtccgctatctgtcatggtcatcactcccacaagtcaaatactctatcgacgtaaaacttcgcctttgctaaatcctcatgaccattctttaacggtgctctagacaagtatttgattgcattacctattgcgaatgctaattgtggtggatactgtgccgtaacttgttcgatgaaatctataatttcaatgtcgccgtatgtgtaatgcgcaggttgtttaacattgtcttgtgtttcattcatatctacttttctgttactgattatgctcattatgcttcactccatttcttgaacatttggttataagtgacatcgaaccagtacggatcacgtgaatgtttttgaggtacattaaacaaatgtggcttcttcttacgtagctcagcctctttctttcgctctctttccaattcacgttcgagtctcgcttgtttaatcttttccatttgtttcatttctctatattcttttaggtgcatgccataaggcgcgtctaaagcttctgaaaactcccaacaacctcttacacgtttagaaacaattccagcatttatcccacgctttgccattatttcttttttcaaaattgttaaatttatatggtttattattaatgattacaacactgcccatttattccacctctacatttacatttctaatttttaaattgtcatactctagtatttcgtctggattgttatataagtaatctgccaacacttctttttctttatccacatcatcgaaatgatgatattcaacttctgtaggtattcttatatcaatcgttgcatttatatatgcttgttgttgcattaaatcacttcatttttctttttcttttacgtctgactttcactaagtcctcatataccatccattcttgacctgtgtatttaggcgctttacatatccacgttaaattcacatctctatactgatatctgaatatcttcgctttgatgttggcaacttcagtcgccttacctttaacgtctacaacttcaaccagtttcccttccttccacaaagagaaatcagctatatacgtaatcggtctttgtttcccaaatttaggttgtagttcgaatttcggttgtatttcgatacgatcatagttagtgccattcatattactttctaaatattggtaatattcacactctactttgctatcaaatacaattcctttgtactcaactttcttagcgttgtatttactcatcgtccacctctaaatatcaaatatcgttgcttgtaaacctagctcttgctcatatagaagcccgtgagcgcctttgaatcgttttaggtcactatcagtcataattttcttttcgtcgctgaaataggctcctgtgagcgaataaacttcatttacgttgtctttatacttgatgactttgatatcttccgtgccatcttctcggtataagtaatatttttctttcggcatttttaacactccttaatattcgacgattgcgggtctttcttctttttctttcaacttatcatcaataagttttttaagtttctcttggtctccgtttgcaaaatcaatcatcttttgagcatatacatctctacaatgtaatatttcttttatattttgttttgtgattaccacgcatctcgctccctgaaatcgtctccgattactcttacttttcttgctctttttttcattctcgaatttatacgttgccagttcatattttgatttagttctttatcactaaagttagttgtaaagatgttgtttttacctactctgttatcaacaatgctgaaaagtttatttatagtgtgttctgtgttttctacacccatatcatctagtacaagtaaatcaatctcactaagtaatttgactagttcgtctgtagtctctactgcatttttgttgtatgtcgctttgatacgatccatcaacattggtatatgcataaaagcaactgtatgccctttagctttaactgcttttgcgatagcgtatgctaggtggcttttaccagttccgtatgaaccttgcaatattaatgattttggttcttttgtagagaagccttgtacgtactctattgctgtttgtttagcgtgtacttgtttttcattttgtggcttatagttgttaactgttgcatctcttagagacggattaacatttgattgattgaaaatataatcaagtttcttttgtttattccttttgtattcttcataagccaatctttgaatttcacattcgcaaccgtctttgtattcatatccattttcaaacttatataagtcatattgatgcccgcatttatcgcaattctgtcttagtattacttcgattggttgatatttttttaaacttttgtttattttttcgtcaaataatggtttcataacttcctcctagtcccaataactttcgtcgtacttcatgcgttctaattgatccgtgccagttggttgtattttttgattgaggtacccctcaaatttattgccaaaaagtgtttctggtctaaggtatttatcgctatccgtgtttaaccattcagctgttttgatatcaatcacctttttaaaatcctccaacctaaaatcttgattccatcttgctttaataaaatcttttgttttagctgtattatgtttaaaatgctttcctgcttttttatttaagtattcgataatttctttatagggaatggaagacaccgtcgggttgcccgacaatatacttccttcattattagtattgttattattagttaaatcattattagtactattattattagtagtacgcccttttcggttttccgtttttccgttttccgaaaacccgtttgccgataatccgttttccgaaaatggcatttcggttggtttttcgtaaactaagtattcaaaacctttaaacacaccgttttcagctcttttttgtattctgtgaacatatttattatccataagttcttgaacgccactattgattgatttttgtccatcattcatatgtttaactacttctgacgtgtatatttgccaattgtcaggacgactcaggaaatacaataatatccctttagctttagcacttaaattactatcgaacacaaaagatttatgcacagttacaaaatcgccactttcttttatcgttctaaatgttgccatttttttatctcctttctgttataattaataaaaatatgattaggagtgaataacttgaaaaaatgtttcattgcttgccctataggtactgatgattctaaagtaagaagaaactctgattttcttttacaatccatcataaaacctgctttagaatcagattttgaaatccaacgatctgaccttatatcatcgaccaataaaatcactgatgaaataattggtggattaacgaattctgaattagttattgtagatttgagtacgcataacccgaacgtattttatgaattaggttacagacacgctctagagagaccaacaattactatgattaacaaagatgagaatatcccttttgatgttagcgcttaccgtacaatttactacagcgaattatacgcggatgtagtaaatgccaaagaccaacttaaagaaaccatcaaaacatttacagataatgatttcaattttgaaaatccagtcaataagtataataatatcgataatgaatacggtgttttaaatagacatttgttagatataaaaagcgatttatccgaattaaaagagtttctaccttcagtgaccaaacaagaccctgatattcccgctgattctatggtaagaatgatggaacttgccgttcagtatccggatcaatttgaaagattgatggaattgcaaaacaaaaacagtcaataacccttcccttttaagaagccctctagatatttaattcgggcttctttttcacgcaattgtttttgttgatattttatatagttaatagcaaagcgtattaatattttgttcatttctctttctctcctttcagcattttattgagcctctcatcaacttttagccatgagtcatgcaagtgatatttatcatcaaacgacttaacgccaatcgcatgttgctggttatgatgttcgcgacataacgctaatacatgtttgttgtagtgattcattttgtttctgttcattcctctgccgactgcttcataatgcgctaggtctgcgtgaggctttccacaaattacacagttgcggttaacagttgaccagtataagagcgatttatcttgtttcagcaagtcgcttgttttgtagctaagtggtatgtcattgtagaacgtccagtcaagcgttgcttcaatgatttgacttgcttgtgttctcgtacaattacttagtgaaatacgttcatcatagccgtagtaagtccttacatactcgatgaacatatgtcgcatatagtccattggttgacctgtatattcttctatgtctttgacaagcgcgaatatttttcgtcgttgcttgccggtaatttgaaacggatctatgacgcttacatcgacttccacatcaaatccgttatcaagtagtaatgtttctttattgcctaattcaacacccgagatgacaactgttgttgtaccgtcatcttgagtgatataactagtaattattggcatctaatcattccaatcagaacggtaagtcatcatcaataatcgcagtggtattatcaaaaggattattaccagtttgagtttgtctttgttgatgataattgttgtttggttgttggttgctattcttcggttctaagaattgaacactgtccgctgctacttctgtaacaaacacacgttgcccgtctttgttttcataactgcgtgattgtaaacgtccatcaacgccagccaatgaccctttggataaataattatttacattttctgcttgttttctaaaagttacacagttaataaagtctgcctcacgttctccttgagcgttagtaaatgttctgttaactgcgatagtgaaagtggtaacactcacaccatttggcgttgttctatattctggatcttttgttaagcgtcctactaatactgttctgtttaacattattgtttctcctcactatccaattgttttaatcccgcatctaatttttggtgtgcttctgcgatttgtttttgacttaatttattaatgttagatatttttagccatctcatcgttttatcgatagttgcatctcgccctttttcttgagataagttcacgaactgattgatacgctcttctaattctgtaatatcgttgtcacttgcacttggtagttcctcgccgttgtagatatataagcctaaaccgtgtaaagccgaagctttaacgaagcatcgtttttgcgctttgttgatatcaaaagttgttgcactacctttagcaagcgatttgtttctaaagtccaatactggaagccattcagtctctgtactatctttcacagtcacagatacctgtacaaaatagccctctggtgttgccaaataaggtacaaaataattttctgtgttaatatctggatgtggaaactcgtgcacttttactgtgtagtttgggtcaatctttttcagctcttggtgtgcatatgaccatgctagataagttaatccatttttttgttctgtatgatcattcacgtttttactgttcaactgttcaaataatgtttgttcagtcatgttctacctcctcgtactcaatagtttctgtcactgttttcttgattgctttgtgataatccatattgatactcgcttcttccataccgttaaactccctagctctatttctatttgtggagtaactaatatctgaattgttatcggttggtttgttagttatataaattggcatatccctatgacgaatgatataagttacagtctgcttcatagcgacctcctaccatctcatgactaagttaattagcctgtctctttcgtctgtgttctcttcaatccattcataaatagattgatttaatatgtctaatgctgtgtatagatcattctcatctgttatatttatactgtcgataaatctatcttctaaatctaagacattcactagaatgctgtaatcttgtttcttaactgctaatttaaaatcgaatccgtctacattaattactttttgacatacatcgccaattttgtagtacattgttgacacttcctttatttcgttttatattgaatatgcattaattttctaattgtttagactgttactcattgccgtgagtaacagtttttttattcttcataaaagtattccttataaaatatgaatgttgcgatacttgcgaatcccgcaatcgaccatgcagtagtgaagtatagaaacggcataagtacaattgctaagactgtaaagcacagtactgctactaggtagcttttataaatgttgctcattttattctctccttatatatttcattgaaatgctcatcgacgaatttattcatctttcttgcgttaaatctccagcgattaaaattctcatctgggtaatgcacaattccttgcgctcttagttctttttcaaatctaggatgaaatagtaatctgtccttgatagtctcatcagatgcaatttttaatttcttctttaagtcactcatgttccatacagggtctaatgaataaccaattagctcatcatattcatcttttgtgataagtacatgtgtttcaggtattggaactgttacgtttaaaatatgtggcatttctatctttcctttcgtgtataatgttgttatctcctagtgaaaggaggtgatattggtgtatattgatcctttaaaaaatgttcgtttttctattaataacgtaattagtaatgttgaaatttctaaaagtatggcaattaaacaatctttaaaacctaagtaccaattagatataattaatagaaacaacataaatttattttctgacttcaaagtagactttcatctaaacaacttaattgaaatgaattttaatttgcgtaattctttttcatctctaacatttcaaagaaatttattttctgaagaaacgataaaatcttttaaggaactctataggtttgatgatgagattgtacttcaagcacaacagaccattagagatttttatatcaatccaactgctatctctactttggctgaagccatcaattcgacctatccaataaatgagcaaagtacctacaagagacacgatgaatttgtcaaacgtatcgaaaatgattttccacatcctttcaaaaagttaataagatggtctaatggcattgcagcaggtgctgacattcaaatctttgtaacaaactatataaacgagaacgatttacatattcaaaattcattgatagttgctatagtttgtttattaagttttttatcgacctattgttcacattctaaaaagtaataataaggcctaatttagttaaccttctttaacaactctgcaactgctcgcaacaattcagggttgttacttctttctaaacagtaactagcatgctttagtaatttgagttttaatttattttttctttcgcgattctaaatttttgtaacatttgttatgcctcctttgcatttccaaaaatttaatctaacttaaattcttttccatctattaatccataaaagttattttttaaatgcggatgtctttcaagcgtcatttcaataaaacgcgggtctatcattaagtcgtagccatcgttgtattgaatattaacgggtcgtctattaccttcttcgtcatagtagtaatagatgacttttttgttttgagcttgcattgttcgttcctcctattaagatgtttgtttttctcctaaaaacttattaacaaagtattgttgtcctttgcctgttacttttggcgtcttactaattgatgtgtgaccgtccgaatgtgtgattgatgtttctttaatttcgaataactcacgttccattgaatactgtgtaggcatgttataatccacacccttgcgtttaataaggaatccgttttgacgtaaccactcaaacaatctgcgttgcccgatgtttataccgttttgtttaatgatctttgctaactctccaactaaaattgatgtcttagtagtagctactgcatctgcaaatacaatttttggtttatcacgttcaatctttgtttctaattgattgattgtgttgttagcaatttttaaagcacgttgcataatcatttctggactgttccatgctttctctacttggatgaaatactctctaaaatcaaaacctttttctgtacctgacatcatcgcaacatgtttagctacatcaagtgttaaagcataatcttctagttgtcttacagctccgttattaacaaccgtacttgtaagtacacttgtaaaatccctattttctttgaaatgcttcaagttaatttctgcccaagcgctaaaacgctttttaacttccaaagctttatataactctcttgcacttattgcgatttctccattttctttttcttgtatgttgaacatttcgccgatgttcgattttgtttttaatgcttgcatattgtttatgctcctttcgtgtataatgttgttatcaacctaaggaggtgataagtatggacataatcgcgatttgtatcgcaatttttagtttcttactgactgcacttaaatattatttagactatatgaaagattctcttaacatcgatgttatacctaccagaagctttaattacttggtcgatgacaaatcaagttacaacgatataacatttattaatttcacaaagtttcccatttctgttattgacgttgaatttgatattaaaaataaagtaaatgaacaaaaaacgttcaaacctatacgatataaagataaaaactactccattccatttactttaggaccttatgaaagtgtagaatgtacttttttgctcgaagaatatccagtgatatgggaatgggatgtgactatcaaagtcactaccaacaaaggaatctatataaagcctgttatcatagaatcgcggacagaacaccgagaatcagagccacaagtgacagagttaacatcagcaaataaggtaagtgctctttccaaccccaaggatggttttttaaagaagtttttatatcatttaaaaccttaaacatttaaaatcctccctttccgtcactctttaattggagtggcgttgattttttcgtctaactttttcaatgctaatttgtaaataactgaagcatgttcggttttaaaatgagattcagcaataattttcaatgtttctaatttatttcttgcatcaccgtatgtggtactttctgatagaacaccttctaaaatttgttgaactcgataatctaaaagttttaagtctttattgatgcattgttcgacacactcttctttggttaacgtgatttgttccattgtgtccctccttaagttcatataacatgaactttttctttaaaaaaatataagtgtattttctctaccggtatatctagtagttgtatagctttccatatttcactgtctttccaaccaactttaccgttgagttttaaggataaacttctctctgacaatttcatagcaattgcaaaattgtactgagtgccatacttttctactattttcccgctcaaacgtgagtagtcgtaacacataaaagcacctcctctcaagttcacgtatcatgaacttaactatactttacaccttgttttgaatcaagtcaatacaaaaattcatgatttatgaacttttttgttgaatttttgttcaacaagctttattatgaagttatcaaacggaggtgcactaaatgagagaaaaagtttcaaatagacttaaacacattatgaaaataagaaacttaaaacaagtagatatcattaataaatcgaaaccttatcaaaagaaactaggtatatctttaagtaaaagcactttatctcaatatattaacgacgtacaatcacccgaccaagatagaatttacctactttctaaaactctgaacgttggtgaagcgtggcttatggggtatgatgtagattcttatcgagttcctgatgaagaacgtcaagatgaaacgataatgtcaaaaatcaataacatattttctcaactcacacctccccgccaagaaaacgtacttaactatgcaaatgaacaattggaagaacagaataaagtcacttctatagatggatataaagagtctaaactagtatcgtatattgcatgtggtgcaactggtgctggcataggagaagaattatatgatgacatattgcatgaagaagtattttttaaagaagacgaaacgccatcaaatgctgatttttgtattttagttaatggtgattcaatggaacctatgttaaaacaaggaacatacgcttttattaagaaagaagattctattaaagatggtacaattgcactcgttgtattagatggagtaagtcttatcaagcgtgtagatatatgcgaagactatattaatttggtatctctaaatccgaagtatgatgatatcaaagtcgcttcgtttagtgatattaaagtaatgggcaaagttgtattgtgattaataacgtatatttagcgctttaatataaatataaacaaaggagaaattgacatgaaaaaagcaatcttaactttaagtcttatatttattacctactacctcacttttaaatatatgtggattaaagaattaaagtattaattatgcttatttgaaaaagacgtctatttcagcagtgtttgaaaggaagtttataatgaaaataactaattgcaaaataaaaaaagaaactatagtatatgaagttttaactagtggtaatcaaccattcacttatgagttacctaaagatttatcgtcacataatgcgcgtaaatacttggaatttatttcacaaaaaatagatggcgataagttaaccaaagaagattcattatgattttactaatcaaaaaacgcctacaagtgtagacgttgaatggtggtgagaattttatggcggataaaaacaaaaaacaagaagctactcgtagtaacccaataaacaaaagttttgaaaagccgggtgccagcgaaaacttaaaaagcactttatcagaaaaagctaagaaaaaagattaatattcattcattaaatataaatccaatttaatttgttgtttaaggtctacaagtgtatgtttaatatacaattcatcgtttgacggtaaatcagatactttgaaatcttgtcgctcaacctctagtaaatcgaaatcgctaccagctgaattataggttttaagttcaccctcttcaatgattctgttttcaaagtctttaataactataaatactggtttaccgttgttattaaacaacttgtctcttttgtctaataagcttatacaatccaaattcataaactttcttgtttcattaattaaccagataatgaatttaacaattaaaggattaaatacaagcactgttaaaacaaaaataattagaaaccaaatatttgcttttagacctgtaagcaactgaagtaaactcaaattttttaaatcaacattattaaaaattataaaagtataaaaccatatcaaacatgtttcaatagaaaaaatcaataatacaggagtattgataatcttgtttttttcactaactaaacctatcattgttagatatttatatggtatgtaacctaaaactcctgtaagaagaagcgcccctagaaattgagtcatcttatcacctactttttattttattataacatatttagtacctagtactaaattttgggtagcccgcctacccttattattttttgccaattttgaggagggaacgcatgaaaacacgttgttacgatggtaaaaaatggcaatatgaatttaagcatgaaggaaaaagataccgtaagaaaggttttagaacaaagcgtgaagctaattctgctggactagacaagttaaatgagttaagaagtggttttaatatagataactatataactcttgaagaatacttcgaaaattggattaaaacgtataaacaacctgttgttaaagaaaatacctaccgtcattatagaaatgcattacaacatatacaaaaacataaaataggtaaaatggagttatcaaagataaatagacaagtttatcagaaattcataaacgactattcaaaagaacacgcaaaagaaactataagaaaaacaaacggtgctattcggtcagctttagatgacgcattatatgatggacttatttttaaaaaccccgcttataaagttaattataaagccggaaaacctacgaagtcagaacaagaaaaattcatctcggtaactgaatatgaaatactaaaagatcacgtcagaaagaagagaactcgttcatcattagcgttattcataatgatttgtacgggttgtcgtgtcagtggtgcaagaaatataaagactgagcatatcaaccaagtgaaaaacactatatttattgacgagcgaaaaaccgatacttcccctagatatatcagtatcgctaaatctgatatgaaacacattatggacgtcataagtacatttgcaattagctatgatggttacattttcaaagaagccggatctataattaaccttcaggctatcaataatgctttgaaatcagcctgtagagtcaataatataccaattattacatcgcacgcattaagacacactcattgttcttatttactagcaaaaggtgtatctatacattacatttctaaaagattaggtcataaaaatatagcaataactacatccgtgtattctcatttgttagaagaaaaatttaatgaagaggacaaaaaaacaactaaaattttagaaagtatgtaatttagggacccattagggactccaaacccaataaatactgttgttacaaggtttctatgtatccaaactgggggcaatataaacgcgctgatttaatcggacaatcttcttatattaaaaataatgatgtcgtaatattcaatgaagcatttgataatggtgcatcagacaaattattaagtaatgtgaaaaaagaatatccttatcaaacacctgtactcggccgttctcaatcagggtgggacaaaactgaaggtagctactcatcaactgttgcagaagatggtggcgtagcgattgtaagtaaatatcctattaaagaaaaaatccagcatgttttcaaaagcggttgtggattcgataatgatagcaacaaaggctttgtttatacaaaaatagagaaaaatggtaagaacgttcacgttatcggtacacatacacaatctgaagattcacgttgtggtgctggacatgatcgaaaaattagagctgaacaaatgaaagaaatcagtgactttgttaaaaagaaaaatatccctaaagatgaaacggtatatataggtggcgaccttaatgtcaataaaggcactccagagttcaaagatatgcttaaaaacttgaatgtaaatgatgttctatatgcaggtcataatagcacatgggaccctcaatcaaattcaattgcgaaatataattaccctaatggtaaaccagaacatttagactatatatttacagataaagatcataaacaaccaaaacaattagtcaatgaagttgtgactgaaaaacctaagccatgggatgtatatgcgttcccatattactacgtttacaatgatttttcagatcattacccaatcaaagcctatagtaaatagtgctcaactaactaataacttgcttcgttctaaaaggacgaagcgagttatattgttaaaatttgaattgacttacattttaataaaatcatcttaacaactttaatttttcattaatacaagtctttactctacactcaaacaagattcatacactgcacgtcataataaatctatctattcaaatataaataaaagttacctactacattctatgtagcaggcaacttttattacttatttcttttcattatcattaagtacttttacaaacttcacattatgtgtcttccaatcaacttcatatatgctgataatttttcttcttttttatctacatggttttcaccagaccaatagccccagaaaccatggcgattccaatctattttaaactcatccattgatcttttataatgaacaacaaattgtgatttacctttgtcttttttatcatgtgacataacagctaaaaattctggattaaacccttcagacacagttacaggcattttgtctttaggtgtgaaattatctttcgcccataaatttccatttcgtgttaaagaaaaaatttcacttttagttctattatcactatcattagttaattgtctcgtatggtcatgtcccatattatttatcaaatgtgcttctactttccaacctacacctttatgtgacgtagattgatcaagtaatgtacgatatgatggttgttgataactaatcgtctctgaataattactctcttttgtaatatttccagttaagcctccacgattaatcgaaaaatctccacctgttttataaccatacgtatatttaacttctcttgattcatcctgattttttggtgcaaagtcagtcacatttgtattgttgttgtcatcaacattttgaattgaaactgaataagatccaggccatcttaatgtactattccaataaccatttgggtctaaaattctcaaaccactaccaattgtaccttttgctttaataaatactgtttctttatcataattaggttcagttaagaaattaaattgtaagctttgagtaatatttttttgactatcacttgttgtagctgtacgtgtatacattttagtatcaccatcaagattcttctcagaaacttgtttgatttcagaattaatctttgcaaatgaagtagctggtaatacagtgaaagtagtcgatagtgctaacgtacaaattgtgatatttttacatagttgtttaatcattagtaatccgccctttcaatattatccttctttataaggtttattgtcatcagaatatttatcaacgactttaactgttttatttttccaatcaacttcataagtgacaattaatctttgaccatctttatttttttctaaaattggaggtgcataatgtattccaggtctgtttttcaaaatatcttgatttcgtgtgtatgttacttcaaattgcgttttctcatttgacttttcattagataaataagttaaaaattctggattaaagccacttcttactaatgctgggtatctatattttgaagcaaagcttagttcagggttttctacagtagcaattctcgtatttctatagaataataattcatcatttctatttttcacttctccaccatacttcaagtcattcgcaataactgaccagtgtacatgccagttattatttttaccgctggcaattgtgtcataattttgctgattataactaatcgttttggagtagctatttgatgaagttcgtccaataccttttgttgaatcgaatttaccacctgagctatatgaaaatgtactgtctacttttgcagttgaaattttatttttcggcaattggtctaatatttcagttttacgatttctttttacttgaaaatctacatggtactcacttggatactttaaccaatttgaatttttttcttctttatgagattcaaactttaaatttgaatgaattgagccttgttttttaacaagtaatacattcttgtcataagttggatcatcgataaagtcgaattgtaaattttggagtatatttgttttctcatcatatactgtttcagttcgttttgtgattttaccgtttttcccaatatcatccggtgctgttgaatttttatctttattagtaacattacgtttgtctttttgttgagacttatcaacatgttctttcttattttggtcttgagagtctttatgagctgaatttgcttgagtcgttgctgctgataacaataaaattgcacatgataatgatgacgctattaaaacacgttttttatttttcattgttataaccttctttcttatgattgatatttgttgatatgtatcgacatgtgaataatatcacaaaaacagagaatatatatttaactatttattaaatgattttgttaatattattaaatactttatcctctttaaaaataatgtgtgtacaaagtcattaatttagcaaatatttttatttagtagttaataaccatcgatttgaaatttatatataattattagctaaataatatcctgcatctttctcatacaatttactataaaattaagcatatccgatatcagcgttaataagatcgttgatactagacagttaatttcatagaacgaaatcaaataacacactactttctgcattttaaattatgtttaagaataaaaattatgtttatataaatatatatactactttgaaaggtgtgagcttaatgacaacttttagtgaaaaagaaaaaattcaattactagcagatattgttgaactacaaactgaaaataataatgaaatagacgtttgtaattatttaacagatttattcgacaagtacgatattaaatctgaaattttgaaagttaatgaacaccgcgccaatatcgttgcagaaatcggtaacggctcacctatactcgcattgagtggtcatatggatgttgttgatgcaggaaatcaagataattggtcatatcccccttttcaactgacagaaaaagatggcaaattatatggccgaggcactacagatatgaaaggcggtttaatggctttggtcgtatctctaatcgaattaaaagaacaaaatgaattgcctcatggaacgattagattactggctactgctggcgaagagaaagaacaagaaggtgccaaattattagctgataaaggctatttagacgatgtcgatggcttaattattgctgaaccaactggatctggaatttattatgcacataaggggtctatgtcatgtaaagtaactgcaactggtaaagctgtccatagctcagttccatttattggtgacaatgcaattgatacactgcttgaattttataatctatttaaagaaaaatattcagagcttaaacaacaagatactaaacatgaattagatgttgcgcctatgttcaaatcattgattggaaaagaaatttctgaagaggatgcaaattatgcatctggtcttacagctgtatgttcgattataaatggcggcaaacaatttaactctgtaccagatgaagcttcacttgaatttaacgtaagaccagttcctgagtatgataacgactttatagaatcgtttttccaaaatatcattaatgatgtggatagcaataagctttcactcgatattccaagcaatcaccgacctgtaacaagcgataaaaatagcaaattaattactacgattaaagatgtagcttctagttatgtagaacaagacgaaatatttgtttcagcgcttgtaggtgcaacagatgcctctagtttcttaggagataataaggacaatgttgatttagccatttttggaccaggtaatccattaatggcacatcaaatcgatgaatatattgaaaaagatatgtatctgaaatatattgatatttttaaagaggcttccattcaatatttaaaagaaaaataagaacgatgctgtcagctgccctattcgcgtgctggcagttttttattgcgaattttaagttgatagaaatagcgatgaatattgtttgaatgtaaatattcaaatatcaacaagcacattttcattgattaagtgatgtaaaactgaaattattgtgctgatttgtcatacatatattgactaatggtcatataaaaagatagcttctaatagttacataaaactcgtaaaaaccttctcgtaaaaggaatgggacataaatccctagaaaacagcagctcaacgagctgtaaattatcaaatacatttgaaaaaagctgatttctatcaaataatttatagaaatcagcttttttacattgtctaagaacttaatgtctctgtctctttggaactttatatttcataagtactattttattgtttaacctttttttaaataaggtataaatctacaatatccaaataagccccatcgattcttataatagtcaaaataattatattcatgtattactcttattgtatttggtaaaatttcattcaatttttttaaatcattgtaaccatatttaaaaacaggttgtgaggataactttgataccgattgatgtctctttgtattattcgcaattgtttttgagcaaaattcaatcgcaaatgtcaaattatgatctcccatctttttgataatagtgtccaataattgagtcattacactctcatcaaaatacatcaatacaccttcaataataaacaatatatctgacttactattaaaaaatttataatttttgacatcatcaatccaactgtaatctagcatagatttagatatcatcttataactattactttctttaaaaaatgtttttcgtatttctattgattctggtacatctaaatctatccatgatattttttctttattaaatctttgaaaccttgtatctaagccacaacctatattgaccacgattaaatctttattatccttgataagcctcttagtaacacaatctattatcacagtacgtatactaattccaatttgagacatgtcatcacatgtaacatttttgtacatatcatctaaaccatcaaatattttttttgatagtgcgtcttttattattggtttttcgttttcgtactcttttgctcgagctatcaaaggaattaacattgattcgggaattccaaccagttgcttcatttaatcactccttaaaaacattagtaccaatgcataagaaaatttttacaacttatttctattattttttatttaaaatttctttttttaatttacttctcaaatgttctaatgtaataggatctgtgaaccaataatcttctgctttatatgaaattacatgtcctttttttacagcttcaatattctgccatgtatgtgttttttcaaaatcaaattttccgtacgaaggtttacttaaaaatatataatcaccagcatatttactaatattttcttttgaaatggaagcatagccttttttatcttcttgtaatttatctttatattgctttgtcattggcataccgaatgcatcatgaacaatatccaaaccacgaccccatgtagagttatatatgtatatttgcttttcatctggttcaaacacagatgctgttgcttgaccaattttactttgaatttcttttttatcttttctagttttatcgtcccactcttcaatccattttttagctttatcttcattattagtcaacttgcctatttcttttaatatttctttatgattgtatttattgtatgtatatgggattgttggcgctattttttggtatttttttatatttttatccatagcatctacaacaattaaatctggttttgctttagcaactctttcaacatcattttctccaatataatcaaccccttttaaataaggttttaaaattgaagaatctttagttatatctgaaacagcaattggtttgattcctaactttataaaatcaccaacataaaatccagttaatacagcaactcttttaggtttctctggtactttcagtgtttcaccattttcaattttatagtctgtagtctttgtcgagttacttgttttatcgacagatgctgaacacgcagtcaaaataaataaattacataataaaattccaattaatcttttcataatatcatccttttgtttttcaattgatattcattttcaattataaaatattaaaagaattagtcaacgcctgttagtaatacacatcagtaacatttctattttcatttatgatattatctaattattaatttataatataaaggagtatgaaattaaaatgaacaaagtccacaaacctttatatttttatttaatgcttttcttctctacaactatcataggtgcacttttattgtatttaccttttactggtaaaaagccaatatcttttttagatgccctatttatagcttcaagtgcatttacagttactggcttgtccccagttgatataggatcacagtttaatatacttggtgagatagtaatactattattaattcaaataggtggtctgggtatcgtgaccgtaaccctattgacactagtatttttaaatagaaagatatcaatgaaaaatagattcttgattatggttacatggaatattgacgaacctggtggtgttattaagctaattaaacacttggctatttatagtttagtcactgaattaattggtatgatttgtttgtgtttatcttttataccaaaatttggtataggcaaaggtttatttttaagcttattcacatcagtatcagcttttaataatgctggatttgccctttttaagaataacttaatagattattctagtgatccaattgtcattattacaatctcaatactcataatatttggaggtattggacattttgtcgtgatagactttattaattgtaaaaaattgagtaaattatctttacattctaaattagtcttaactacaactagtatcctaataattataggagctattacattctttttattagaacagtttaatactatgcaacatatgggactagttgaaaaaatcggaaattcttttttccaatcagtaacaacacgaacagcgggttttaacagtatagatatagcaagcattaacaaatctaccgcattaatgttaatgctacttatgtttattggtggtgcccctctcagtgcagctggaggaattaaaataactacttttgcagttgcgtttatttttgtactaaattatatacgtaaagaaaataatgtttcagtattcaataaagaaatatctgacaaacatataaaactatctattgttaccattaatatctcatttctatttatcagcatcattacttttatattatcgataattaatccgaacatatcattaatcaagttattattcgaagtggtttctgcattcggaacagtagggttaagtatgaaccttaccacagaatatcatggtattactaaaataattattatattcgttatgctttgcggtaaagtaggactattaactttattaagaacatttataccaccaaaaagtcctaaaaattaccgctacactaaaggacaaatttatctataaaataactatccatctttaataagaaatgaactagtgttttaatctattacattaaaaaaactacctaaacaggtagttttttatttattttaggccgattaaatgtcttatgtctttaattaagtaaaatgcacaagtacacctttaaaaagatttactcaaaactaaactatacctagttaaccgcttgtgattaagaaattttaaatgtggtttcttttaattatgtcaaccacccataaggattttaatcaagcactcattcattcctgcactcgcaatatgcattacttatagaagtggatgcactctcatattatggcaataccataactcccgcaccataatgatttaaataccattatgaatctcaattacaaattagcacataaaaaagacgcctcccataagtctagtcaccaaatggaaaacgtctcgtaattaaaatatatttgcgtgcattctaatttgtacttagaatacatcatactcgttcataatgtaattttctaattagtcaaaactatatacagttttacatcattcccggcattatgcactaataaaaacttactttaatacacgctttaaagattattaaatcagcgttttaatttttagacaacgctattattttagtttttcaattctattatgtcataattatgtcactcaaaaactgttttccaacattgatttattgttggaaaatctcgaaaatctagtctatttctccaacaatcgaagaattatgcccttttttctccctttaaataagtcataatacgaggcatacatgcaacatttacaataaaatatgttcctacatcgtattatacgaatgctcacacttatagttgtttagtaaacccagatgtattgctaacatacccattatcactatatagtttatgtgcagatagtctttcatttctattaccactatttagtgttattgctttacaattcaaccgtttagaaaattcttcagaatcagctaataatctctttccataaccttttttcctaaattcagaatgtataacaaacgcaaggattctcatatactctgcatttttttcgtaaaacatcattttacacataccacttaaaccaattattttattttcttttatcaaaagcagtaggaagtaatcatcatgattcgttattttctttagtctcttttttaaatcattctcatttgttggataacctagatcatcatataatttacatagttgatttaatttttcaaaatcactgttattaaacaatcttgtaattatgctcatataacccaccctaaaaatattatgtacctattgttacatacaatagatacgcaaaatcatttctcactgcaaatcaggacgtttctcagcgtaaacaaatcatttctattcttttgaaaaatatctgcatatcttcacagtaattttataacagattaataaaattaaaaaacataacaacaagtattataataaatattataatagctatcgtattaaatagtttagaatatgcaaactgaaaaataaaaatcacaattaaaatactaagtaatgtaaatggtaatagcatcatcagatctttaacattatttctttgttcttgctcccaatcgctaatagccctaaaactactttttttatctataggcgatgtaaaaataccatatattgaaggtgctatacctcctaaaatagcagttcccaaagttgtcattactgaaattactgcgaaagtatcatccgaaagcaataaattcaaactaatgcattgtttattacccatcgaatttattgaccaaatagctagagaaataaacaacccaaaatttaaaataaatgatatagtaatagcaattgtttacaaaacacgaaatttttcatttttatttatattatccatttttctccctttttcttaaatcattttattatatattacaataatcaatctgaaatgttgatgtaatttaaaaaaatatcatacttttactcctgaaaacctccctaaatcatcaatatgaaaatcagtattaggatattgcgtttacaactcttttaaatctcactcattcttctcatcgtcttaaccgatactatcaataaatactggcaacaccataaaatatatacccaatttataaaaacctaattgactcataatcttctaacggtatatcatccacaatcacagtatgattaggattatcgttagatacatctttcactgccttatctaacccctcatcacctccgtcccattcaccaatattaatgaatataggtacattaccgtttatatcatgcttatttgtaaataatttatgatatttacccaacatatcacgagcttttaaacgatcactaggttttattggtacctctatcagttcaacatgttcattatagactaattgtactttgccactttgtggattttctttatattctccacgcttgactacaacttctttcgtttctgtttcatcaccgactgccgcattcgttagcacatgtaataactcttttgcggttaatacattctcatctataatcttatctttttgttcttgtatatattgcttgatgtgcggctttttcaataacctacacgctgtcacatgtgcgctatttgcgttatatcctgcttttatggcactttgtgttacattcagtgttctaatatactcattcacaaaacgtgcttgctttgcagttaactcactcattttatcacccccacaattttatctaatatggtttcataccataatattacagattgttctgaacaatctaaggcactactaatatcttgataactaagtccttgtataagggagtcaaaaatataaaactctttatcggtcgctaatctgtcaacaatcatttctatgtgattctttataatatgatcattgacattatcgtctgtcatcaattcgtcagaatcttcatcacctattaaaaagaaatcatcagtatttatttcatcatcgccccgttaactagctttgaagtctttagcacacttgcatataccggctgtcgtgctggcgagatactagcattgaagtggtctgatattgattttgaaaacaacacgattagtattactaaaacatattacaatccaaataataacaagaagaaatatcagatacttccccctaaaactgaaagttctatcggtaagatttccgttgacccaaatgtaataaaggtgttgcgtgattataagataaacgttcaaaataattggaaaaacgaattatataatgataaccattgtaatgaaaaaactatcaatgtggatacaaaccattatgtcacgtaccagcatactcaaaaatatctctacgcactcattcagatacacacattgcgcattgctcatagaatcaggtgtacacattaaagaaatacaagaacgattacggcataaagatatcaataccactatgaatatctatgctaaaatcacaaattcatacaaaaaagacgcctcccataagtttagtcaccaaatggaagacgtctcgtaattaaaatatatttgcgtgcattctaatttatacttagaatgaatcatactcgtgcataatgtaattttctagttagtcaaaactataaacagttttacatcattcctggcatgccacccatgttaggttggtcattatttttttctggaattgatgctacaaccgcttcagtcgttaagaacattgctgcaacacttgcagcatgttgtaatgctgagcgtgttactttagttggatcaacgataccttcttctaacatattaacccactcgtttgtagcagcgttaaaaccaacacccggctctgcgtttttcaaacgttctacaataacagaaccttctaatcctgcattttcagcaatttgacgaactggtgcagttaatgctttaagtacaatatttacacctgtttcaatgtcaccttcagcttcaatttcacttactttttggtaaacatttactaatgcagtaccaccacctgcaacaataccttcttcaactgctgcacgtgtagaatttaatgcatcttcaatacgtaatttacgttctttaagctctgtttcacttgctgcacctactttgataactgcaacaccacctgctaatttagctaagcgctcttgtaatttttcacgatcaaagtcagattcagtttcttcaatttgagatttcaattggctaacacgtgcatcaatgctgttttcgtcaccgtcaccatcaacaacagtggtattatctttagttacttctactttacttgcagtacctaacatatcaattgatgcatcttttaaatctaagcctaaatcatcagtaatcacttgcgcaccagttaaaatagctaaatcttcaagcatcgcttttctacgatcaccaaaaccaggtgcttttactgcaacaactgtaaatgtgccacgcatacggtttagcacgatatttgttaatgcatcgccttcaacttcatcagctacaattaagattggacgattagattgaaccacttgttctaataaaggtaagatatcttggaaagacgagattttcttatctgttactaaaatgtatgggcgttctaattcagcaaccattttatctgaatcagtaaccatatacggtgattgataaccacgatcaaattgcataccttcaaccacttctagttcagtgtttagtccatttgattcttcaattgtaatgacaccatcgttacctactttttccatagcttcagaaatataacgtccaatttcttcatctgctgctgaaatcgcacctacttgcgcaatttcatttttattttcaactttttgagaattttcatgtaacgcttcaacagcaactttaactgctttgtcgataccttgtcgtaaaccaactgggttcgcaccacttgtaacatttttcaagccttcttgaatcattgcttgagctaatactgttgcagttgtcgtaccgtcaccagcaatttcatttgtcttatttgcgacttcttgaactagtttagcccccatattttcatatggatcttctaattcgatttctttagcaatcgtcacaccatcattcgtaattaaaggtgctgtaaactctttatctaatacaacattacgtcctttaggaccaatcgttactttaactgcatttgcaagttggtcaacaccacgtaacattgcttgacgtgcatcttcagagaatttcaattgtttaaccataaatgataaacctccatttgtttagttgtgtttcattttcgttctatttaatttatttatgaattaagttctgtattattcaataactgctaaaatatcttcttcatttaataccagatatgtttcattatctcgtttaacttctgtaccagcatattgttggaacacgacacggtccccttctttcacttcaggagtcactcttgtaccatcatttaataggcgtccagttcctactgcaacgataacgccttcgtttgatttttctttagcactatcagttaaaacaataccacttttagttgtttgttcttgttcttttttctcaataatcacacgatttccaattggttttagcatgattgttcctccttaaaaaacctaaagtttagcacttaacattaaagagtgctaacatacatttataataatcaaatttggtcaaaatttcaagtcataaccttttaattaagttttgtaacttcaagttatttacgataaaataaattataaacaaatatttggaggaaaattatgacaagattatggacatcattgctaactgttattatttatatattgtctcaatttttaccgcttctcattgtaaaaaaattaccatttgtacaatatagtggcatagaactgactaaagcagtcatttacatacaacttgttctatttttaatcgccgccacgacgattattttaattaatttaaaaattaaaaatccaacaaaattagaattagaagttaaagaacctaaaaaatatatcattccatgggcattgcttggatttgcattggtaatgatttatcaaatggtagtgagcattgtattaacgcaaatttatggtggacaacaagtaagtcctaatacagaaaagctaattattattgctcgaaaaatacctatatttatcttctttgtatctattattggtcctttattagaagaatatgtattcagaaaagtaatctttggagaattatttaatgcgattaaaggtaatcgtatcgtggcatttattattgctacaacagtaagttcattaatatttgcattagcacataatgatttcaaatttattccagtttattttggtatgggtgtcattttttcattagcatatgtttggacaaaacggcttgctgttccaattattatccatatgttacaaaacggatttgtcgttatattccaattacttaatcctgaggctttgaaaaaagccacggaacaagcgaattttatatatcacatttttattccataataaaaaaaacgaatcacacacggattatcgtcgctgtgattcgtttttatttttctttttatttcgctttacaaataagaatagcatgattgaaaataccaccatcatagaacatacaattgctagccaacttttactatatgcagttgacgcacttttcttattatcttcttgttttttaactactgtaaaatcgtctttttcatgcggttcaaatgagcgttgttttgaatccggcttatcttcgggctttttcaaatctggcattgatccaatttcaccagtaattaatgcgagtacttgttcatctaaattacgatagtacctttctgatttcaatggattgaaatattggaatctaaagtaattcgattgctgttgtaatccatttaaatatgcatttccgctgaaattttgttttcgaataatattataaatgtcttcatcagtaacttctccataatctttgcccaacttattaatttgatttaaaatatacggattatacttgtaagccccatttgccaaggctaaaaatcgttgggatacaaaatcattaccagtaggattttgtgagtttccttgattcccatttggttgccattgaccttgattagatccatctgaagcatttgggttccatgtccccccatttttcgagccaccagaatgattggaatccccaggttgatcgggatctggtgacgggttaggatttggcttattagggtctggttttggattcggatttggctttggtttatctggatctggttttggatccggatttggctttggtttatctgggtctggttttggatctggatttggtttcgggttatctggatctggttttggatccggatttggctttggtttatctgggtctggttttggatccggttttggtttcgggttatctggatctggtttaggattcggacttgggttttggttatttgggtctggttttgaatctgtacttgggttttggttgtttgagtctggcttcacattattcgaatcaggattagcatcacgactattcgaacctgttccttcattacccgtttgatttgattcgtgaggtgtcccagtctcattattattcatttcactatttactgatggtgaagttatattatgattcaaattagtagttggtttttctccatttaagttatcctttgcttcaactgtgtgcgttgcaagccctaaactactactacttaaaattaaaatacttgttgaaagtaacattttcttaaaccaatgatatgacatttcacgagacacctccctttttcatgtaagtattaatctaagtataataaatatgcgttgaaaatgcatttatatttggaatttgaaaatgaatattaatattcttgaaattttcgtaaatattgctttacaagtacgagtataaattttatacttagtctattaagtattctttactaaagaaggagcaataattatgggcttatttaaaaaagataaaaaagcaatgacttttgacaatgcaatggaagaaagacgttcaatatataatttgaaagattcgatatcaattagcgatgacgaattagaatcaatgattgcacatgcagttaaacatgttccttcatcatttaattctcaatcaactagaattgttctcttgttaaatgacaacaataataaattttgggataacacaaaagcaattttaaaagaagtcatgggagagaatcgtgatttcgagccaactgaacaaaaaattgataacttcaaacattcatacggtacaattttgttttatgaagatcaagatgttgtaagtggtttacaagaacaaatgccaaactactatgataattttgcaatatggtcaactcaaacaaatgccatgcatcaatttgcaatttggactgcattagctactaaaggcataggtgcttcattacaacactataatccacttgttgatgagatgacttcaaatgaatttaatattcctaaaagttggaaacttattgctcaaatgccatttggtgatattcgtgaagctgctggcgaaaaaacatttaatccagtggaagatcgtttcgtaataaaaaaataatcaatatattgttaggaatgggacagaaatgataaagaatcattagttattcattatgtagtagttcttacacattagccgctgctaatgtgcacttaagaataggaatacatgagtaaaactcatgtataagaaatactaatttctaaagaaaaagtatttctttatgttagagcccaccccaacttgcattgtctgtagaaattggtgttccaatttctctatgttggggccccatcaactactgtcaatataactttgtagagcctaggactttgattttatgtcttgtgctcgttttttgcgtttcaacataacttttagtaagttatatataagatctatcaaggatgtgatgttatgaaagtccaaatttatcaattaccgattgtttttggagatagttctaaaaatgaaactcaaataacgcaatggttcgaaaaaaatatgaatgctgaagtagatgtagtcgttttacctgaaatgtggaataatggctatgatttagagcatttaaatgaaaaagcagataataatctaggacaaagtttttcatttattaaacatttagctgaaaaatataaagtcgatatcgtagctgggtcagtttctaacattagaaacaatcaaatatttaatacagcttttagtgtgaataaaagtggccagctgattaatgaatacgacaaagttcatttagttcctatgttaagagagcatgaatttttaaccgctggcgaatacgtagctgaaccctttcaattgtctgacggtacttatgtgacccaacttatctgttatgatttacgttttccagaattattaagatatcctgctcgtagtggtgctaaaattgcattttatgtggcgcaatggcctatgtcacgtcttcaacattggcattcattactaaaggcacgtgcaattgaaaataatatgtttgtcattggaactaatagcactggattcgatggtaacacagaatatgctggtcattcgatagttataaacccaaatggagatttagttggagaattaaatgaatccgcagatattttgactgtagatttaaacttaaatgaagtagaacagcaacgcgaaaatatacctgtatttaaaagtattaaattagatttgtataaataagaagcgcccgaaataatatttaacacatgtcatgactaaacatagatttatgagagatttttcataagtctatgtttattttttataatagataactcagtaagaacccatttcgccctttgcaaatgaatgattttcttaattaaattgattaattttttgaccttttccaacattagacttattcatatattttaacggcgggtctcataatgatgattaactcatcccttcttcattacaaaaaaggccgcgagcttgggaggggctcacgaccatacttattattaagggaatgttttacagttattttttcaatctatttttggggatgttattaattatgaaaaaaattttatttatcaaataatgataaatcgatgttgtttacgatagcttacatgctagaaataattatctgtaatgataattaagaaaaatacatagcactgagtccaaggaaactaactctactagcaaatgttactcacttgctaattttacatggttattaagttgggatggcttaataactcatacttttagtactatacgaagataacaaatttacaatgaaagtaattaattattcatcttattttttagtgaatttgttcactgtgtcgataatccattttactaagtcaccgattgttgaaatgatatcttgtgccattgaaatcactccttccttaattaagataaaaattcttaaaattaaacaactcatcaactattttccatcacatctctgtgatctagttatattaaaacatgctaaaagcatttattttccaatttttcttaactagtcgttttttattcttaactgtaaatttttttatgttaaaatattaaatacaaattacatttaacagttaagtatttatttcctacagttaggcaatataatgataaaagattgtactaaatcgtataatgacagtgaggagagtggtgtaaaattgaattattttgataataaaattgaccagtttgccacgtatcttcaaaagagaaataacttagatcatattcaatttttgcaagtacgattagggatgcaggtcttagctaaaaatataggtaaattaattgttatgtatactattgcctatattttaaacatttttctgtttacgttaattacgaatttaacattttatttaataagaagacatgcacatggtgcacatgcaccttcttctttttggtgttatgtagaaagtattatactatttatacttttacctttagtaatagtaaattttcatattaactttttaattatgattattttaacagttatttctttaggtgtaatctcagtatatgctcctgcagcaactaaaaagaagcccattcctgtgcgacttattaaacgaaaaaaatattatgcgattattgttagtttaacccttttcattatcacacttatcatcaaagagccatttgcccaattcattcaattaggcatcataatagaagctattacattattacctattttctttattaaggaggacttaaaatgaatacattatttaacttattttttgattttattactgggattttaaaaaacattggtaacatcgcagcttatagtacttgtgacttcataatggatgaagttgaagtaccaaaagaattaacacaattacacgaataatttaaatagagagtgtgatagtaggtggaattattaaatagttataattttgttttattcgtattaactcaaatgatattaatgtttacaataccagctataattagtggtattaagtacagtaaacttgattattttttcatcatagtaatttcgacattatcgttatttctatttaaaatgtttgatagcgcgtccttaatcatattaacttcatttattattataatgtattttgtcaaaatcaaatggtattctattttgttgattatgacttcgcagattattctatactgtgctaactacatgtatatagttatatatgcatatatcaccaaaatttctgatagtatatttgtaatattccctagcttttttgtagtttatgtgactattagtatactattctcatatataataaatagagttctcaaaaaaattagcacaccatatctaatactaaacaaaggatttttaatagttatttcgactatcttactgcttactttttcattatttttcttttattcacaaataaactcggatgaagctaaagtaataaggcagtattcttttatttttattggtatcactatatttttaagtatattaacatttgttatttctcaatttctccttaaagagatgaaatataaacgtaatcaagaagaaattgaaacctattatgaatatacattgaagattgaagctatcaacaacgaaatgcgcaagttccgtcatgattatgtcaatatcttaacgacactttcagaatacattcgagaagatgacatgcctggcctacgtgattatttcaataaaaatattgtacctatgaaagacaatttacaaatgaatgctataaaattaaatggtatcgagaatcttaaagtacgtgaaattaaaggcttaattactgcgaaaattttacgtgcacaagaaatgaatattccgattagtatcgaaatacccgatgaagtaagtagcattaacttgaatatgatcgatttaagtcgcagtattggtattattcttgataatgcaattgaggcatcaactgaaattgatgaccctatcattcgcgttgcatttattgaaagtgaaaattcagtaacgtttattgttatgaataaatgcgctgatgatataccacgcattcatgaattgttccaagaaagtttttctactaaaggtgaaggtcgtggtttaggtctatcaactttaaaagaaattgctgataatgcagacaatgtcttattagatacaattatcgaaaatggtttctttattcaaaaagttgaaattattaacaactagccataaggatgtgaatgtatgaaaattttcatttgcgaagacgatccaaaacaaagagaaaacatggttaccattattaaaaattatataatgatagaagaaaagcctatggaaattgccctcgcaactgataatccttatgaggtgcttgagcaagctaaaaatatgaatgacataggctgttactttttagatattcaactttcaactgatattaatggtatcaaattaggcagtgaaattcgtaagcatgacccagttggtaacattattttcgttacgagtcacagtgaacttacctatttaacatttgtctacaaagttgcagcgatggattttatttttaaagatgatccagctgaattaagaactcgaattatagactgtttagaaactgcacatacacgcttacaattgttgtctaaagataatagcgttgaaacgattgaattaaaacgtggcagtaattcagtgtatgttcaatatgatgatattatgttttttgaatcatcaacaaaatctcacagactcattgcccatttagataaccgtcaaattgaattttatggtaatttaaaagaactgagtcaattagatgatcgtttctttagatgtcataatagctttgtcgtcaatcgccataatattgaatctatagattcgaaagagcgaattgtctattttaaaaataaagaacactgctatgcatcggtgagaaacgttaaaaaaatataataagataataaagtcagttaacggcttattcaattgtaaatcttgttggattttaacaagataactagcaaatgcactgtatagctggctttttaattttattaacaaaattaaatatgacgcgtgaattaaaaaatgatgtaacgtctctttgtatacctattcctattactacataatttatcaatttctatttcactctacaatcctatggcgcaatttttaacaaaatatactaaatttgaaattgacagtttccataaataaaatgctataatttcctactccgtgaatcttattttgttttaaaaaacagtgtagcacaagattcaacttgtttcctacactgttttataaatgaattatttaaaatgattgttcaacctcttgtaatgttggcaaactattaatagcaccatacttcgttgtcactattgcagcaacgcgattgctaaacgctaaaatttcctcaccttcattttcaaataactgagttaaatttaacacatcggttgctaaaatcctgctaataactgcaccaataaatgcatcccctgccccagttgtatcaacaggttttaccttatagccactatgataatgattaataccatttttcaaatatacggcagcaccatctgctcccttcgtataaatgactacagtaacattacctgtaaataatgattgaatggcttcattttcatcatgaatacctgtaataaattctaattcttcatctgaaacttttacaatatgcgccaatggcaaaaaggtatgaatagtttgtcttaaatcttcagcgttatcccataatggcaatcttacattaggatcaaatacgacagtaccatttgcatttaatgttttggtaatcaattgataatgtgcatctctcatcggactatcgaccaaatcaacagaacaaaaatgtactacatcattttcattcacatcaatatcattcacaaaacttggttcaaataacatatcagcagagggcttacgataaaaagaaaaatctcgctcgcccgcttcagtcaaactcacaaaagctaacgcagtgtttgcttcattcgtgcgatacacttttgatacatctacaccaatacttgatatcgtttcaataatgctatctccaaatgcatcattacctaattgtgtaatcatatacgcttgttgtcctaacttttgaactgtacaagctacattgcatggcgcgccaccaatttgcttcgtaaatgtttgaacatcttttaaattcgcatttgtaacatttggaataaaatcaattaacgcttctcctattgaaaatagacgtctcatttatgttcatcctttaaatcatatttagtaaattgtaaatatacttgccctgattctgttgatgttttaatacctagtgcgtcttctgtcgggaaaattcgagatgtcaaaacacgttctccatcattacagaaaatttctatactagatgtatcaacaaaaatttgtaattgctttaatggcgtgtctaatatcgtactacgcgtcgtaccttcaacatttgtcggcaataaaccactgtcgctgcgatctaatgttattttattttcacgcttgttataagcaattaatgttgaagaagtcttagatgtacgtaattcaaagtacacttcggtagcatcattatccaaaatatctatgattaattcatactgtttaccttcatacggatgtaattttcgagtaaatttatttgcgtagcctaatgctgtctctttattgtgacgtaatttttccaacgctggatatggacgttgcttaagttgaccattttctacatttaatacacgaggaattgttaagcaatgggcccatccttcattatcagtaggatattcgatttccggtaaccccatccatccaattagtactcgtcggcctttttcatctaaaaatgtttgaggtgcatagaaatcaaaaccattatcaagctcgacaaaattttcatgttcatatgttaacttttcaatatcaaactttccaagtatataaccactttgataaatatttttgaactgatcgccttttggttcaataccttgtggacaaataagtatgacatcttgattatctacattaaagtaatctgggcattcccacatatatccaaaatcatccaactctgtatttatttcacctaaataatgccaattaattatatcttcagtattataaagtaataatcgaccttgctgatcattattttgtgcactaatgattgcataatatttctcatcatatttaaaaactttaggatctctaaaatgactcgtatatccttctggttgttggctaattactggctttggaaacttttcaactgaaccgtcttctttcaatcgtgcgatcatctgactcgcatgtcgttgccaatgattatctcgatgatttcctgtgtacatataatataaatgcccgttatattcaaaagcgctaccgctatatacaccatggctgtcatatttagtatctggatttaaaattggcccttcagctttaaagtttattaagtcatcactcgtgtagttataccaatactttaagccatgtactgcgcctaatgggaaccattgatgtgaaacataatacttccctttataaaaaataagtccgttggggtcatttaataagcctgtttctggttgtatatgaaattgttgacgaaattttgattgatcaacttgttgttttaatgttttaaaatactcagtatcaacgtcctcgattcgttgataacgttcttctctagtccattcggtcataatatttacccagtcctccttttataatttatgctgttaacaatttatattctattatagcaaattttacctacgttctttaacttttaacctatccatttatagttatatggtatcggttccacatttattttaaaaaatacagcgtctaaatattaacatctactgtgacgctatatggcatatcttgctttttaagcatctgttgtatctcttccatcgcgcattggccagcttcaaaataattataatgaattgtttttatcgatggagacactaattgtgtcattgggtcaccaccaaaaccatatatttgatgtggtttcataacatcttttttatcagaataatatttataggcagctaatgcaatcgtatcagttgctccaacaaccgcatctacttgctccacattttccaaaacatttgcaacatctttttgtgcttccacataagtaaaatttgtttcatgtatattaggtttaatttggtatttagctaactggtcaagtaaaccacgttttctatgtataccaactgcaatatctttttcacttacactaaacacttcaacttgttgatatccctgttgaccaatccattcgcctataatttgacctgctttataatcatcatgcacaatactatgaagttgttcatgttgttgaccaacaataacgattggtacattcattttattaatgacttcaatatgtctctctgttatgtctgtagccattaaaacaataccatctactttactgcgtgctaatgtttcaagcgcttgtatttctgcttcgatatttaaacctgtgtaatttaaaattaattgtgattcatatttttggcattgttttgccaatcctttgattgtttcatctactgcatatgaattcattctaggtataatggcaccaataaggtgtgtttgtctcgctcttaaactttgagcaaattgattcggttgatagtcatgttctgctataattcttgttaatttttcacttgtttttttactgacagatccattatttaaaaatctagatactgtactttttgaaacgcctgccaatttggcaatatcagatatatttttcatacttattcacctatcattatttgtgacacttagccttattttagcatatgtgtaaccgctttaaataatatttctgcttctttcataaaaagatttcaaaataaaacttttgtataacaaaatgtcccaacatcaacctttagttaaatgtcaggacaatgaatattctatgtaaatatattctaatatcgaatatgtttattgaatctatttagctcaccttcaaagtaagcatgttcaccgtgaacaatcttgtctaatcctatattcgtttcttgttccgtaacagataatggtgtaattaatttaattactttcgcaataataaacgtcatgactatactaaaaattacaactgctgttacacataatatttgtacaagtataatatgtatgtcaccagtataaataaagccattctcaatgtcaggattggcttttttactttggaaaactgctgttaaaacagcaccaataataccaccaacaccatgaataccaaatgcatctaatgcatcatgatattttagttttaccttgatgtaattaatgacaatataacaacagatacctcctattaaagccattattgttgcactaagatatgttacatatcctgctgcaggagtaatgacaactaatcctgctaatgcaccgagtaaaagtccaagtaaacttgtcgtctttttaaaaatatattctaaaattaaccaacctatagcacctgcactggctgaaatgacagtatttgtaaatgcaagcatcgcaatattatcaaatgtaaaagcactacctacattaaatccataccaaccaatccacacgaatataccgccaatcaacgtaatgataagattatgtggtgttgattcagaatgtttgtttccttttccaatcataatagctaatactaaaccagaaacacctgatgtaatatgaacaaccgtacctccagcgaaatctaatacaccgagtttgttaatccaactgccgccccaaacccaatgtgctactggactgtatacaagagcagtccatattactacgaataataaataaggaataaacttcattttctcagcgattgaaccagataaaatagaaattgcaatcgtacaaaacatcatttgaaataacataaacaaagcgaaaggaatatgtgggctaatatcttcttgagtcgcaaaacctacatgattaagaaaagtatattcccaatttccgaaccataaattcccattcccaaaactaattgtaaaaccaactgttatccatacaaatgtaacaagcacaattgctgccatactttgcatgacagtattaagcgcatttttagattgaactaacccaccataaaataaacttaatcctggtgtcattaaccaaactaataatgtacacaaaaacataaatatcgtatcgttaagattcatacttaccactccttttttttcataataatctgacaatttataaaaagcaaaaatgcgttaagttttattacatcttttggaataaaatgtgccacactatataaaaatgatttcatgaactaaaacaaaaaagactacttactcacttttaaattagcggaagtagccatagaatctaatatctattttattgttaaaatgataacgttaaactttttgaattgtaattgtccatgaagcattatcaatttgttcatagtttgttacaggataaccattttctgcagcccaatttggaatggcttccgtcgcttgcgtgcaatcaaaatcaatttttaattcatctccagattgcaatgttgccattttcttttgcgcttcaattaacggaaatggacataccattcctactgtacctaattcgtgtatcataattatttctccttttccaatcacttttatttgatcaacatcatttgcataataatcttctatactatttgcgtttgctgtttaacctttgcagattgttggtgtacttttttcattggacgaacaaagataaaatgactcattgtccatacaccaactatcatcgatgctagcgcaatccatccttgccaagtcatcgttgccgtttcaaccaaaccgttaccgatagaacaaccaccagcaactgacgcaccaaatcccatacatatgccaccaatggcactgtttcgtattgtaatcttgtctggcaatcgccatttaaattctcttgatcctctagctgcaatatatgaaccaatgaaaattcctagaactaaaaagacaccccaatcaataaatttagtttcacctgtaatcaaaaagtgtactaaatttgctgaaggcgttgttatacctaaaccgtcatttcttccagttgatgcactcattggccaagctaagagtgcgataagtccaattacaattgctgcaataaatggatggtatcgtttttcgaaaaggtaatatctaatacctgtataacgttgctttagttttggaacagcaactcgaactttcttattattgagtgttcttacaactagaaaaatggtgattatagttaatataacgactaatccccaaaacggaatgccagttgtttgagacatatcactatttacattcgttggttgattaattttatccattactggctttaaaatccctgttttagtgattgctgcagtaacagcatataatactaatgcaatccaactaccaattagcccttcaccagcgcgataccaagtacctgttgcacatcctccagccaatactattccaattccaaaaataaaagaacctataattgttcccaatattggaaaactatgtgcaggaatttgtaaaatatctgttgccgtcaaaatcaataatcctatactttgaatagtaatagcgattaataatgcatagaacatcttattattcttttgcacatacatatctcgaaagccacctgttaaacaaaatcttgttctttgcatgacaaaacctaagagtcccccgacaattaagccactaaaaatcatccacataatcctaacctctcatttccgataagtttagtatgtattataggtgatgattttcttgttttcaaccttatacacaatatttttgatatttatattatattcatataaggaaggcgattaattacgattcatcattatatctctacgtgttaatttattaacctatactatatttatcaacacaacagtttttcctttcattttcaaacataacagaaaaagcctgagacatacttagtcccagactgttctataattaattaaagatataacaaggttaatcattcaaagctaacatcacatttattcactgtaatttttcataaagaataataatgactgtaattctatacctaagtcaatttgatgtacttgcacatctgaaggcgtattaattctaccaggagtgaagtttaaaatacctttcacaccagcttggacgagttcatctgcaactttctgtgcaactctttctggtgtagttagaatcacaacatctatttcttccttcttcaatgttgttattaattcatcgttatctttaacaataacgttccctattttctggccaataacatcttcttttacgtcaaacgcttctgtaatcgtcatatcgtcatgtattgaaaagttatatgtgagcaaagctttccctaggttcccaactccgacaattgcgattttgatcatgtcactctcgcttagttcagatttaaagaaatccaataaactatctatattatatccgtacccttttttacctaattcgccaaaatatgaaaagtcacgacgaattgttgccgagtcaatttgtaacgcatcgctaatcgcttttgaatttacacgatctatacctttagattttaatgaactgacaaatctataatataacggcaaacgttttaaagttgctcgaggaattttaacttggtcactcattcgctatttcctccttcgtgtttgaatgaattatatctatgtattcaaacgagttagagcgtaattgttagattattaaaaaacaaataattgattacaatgaatacctaaatattatacattattgaattttaaaaataaatatcttagtttcaagacggcgttttatactgtaaaatggttattaatgtaataattacgacttttttcataagttaataaaatttgagaaagacgaaaggtgaagatcgaatgatacttttacaactcaatcatatatcaaaatcgttcgatggtgaagatatatttactgatgttgattttgaagtaaaaactggtgaacgaattggtatcgtaggaagaaatggcgccggtaaatcaacattgatgaaaattatagctggcgtagaaaactatgattctggaaatgtgtcaaaaattaaaaacttaaaactaggttatttaactcaacaaatgactttaaattctaatgcaacagtttttgaagaaatgtcaaaaccatttgaacatattaaacgaatggaaagcttaatcaaagaagaaacagattggttatcaaaacatgcaaatgattacgatagtgatacatataaaacacatatgtcccgttatgaatctttatcgaatcaatttgaacaattagaaggatatcaatatgaaagtaaaattaaaacagtactttacgggttaaattttagtgaagaagatttcaataaacctatcaatgattttagcggtggccaaaaaacacgtttatctttagctcaaatgctattaaacgaacctgatttattacttttagatgaacctactaaccacttagatttagaaacgacaaagtggcttgaagattatctacgttattttaaaggtgcaatcgtcatcatcagccatgatcgttactttttagataaaatagttactcaaatttatgatgtggctttaggtgatgtcaaacgctatgttggtaattacgaggaatttatacagcaacgggatttatattatcaaaaacgaatgcaagaatatgaaagtcaacaagcagaaataaaacgattagaaacttttgttgagaaaaatattacccgtgcttcaacaagtggaatggcaaaaagtagacgtaagattttagaaaaaatggaacgcattgataaaccaatgttagatgccaaaagtgcaaatattcaatttggctttgaccggaatacaggtaatgacgtcatgcatgtaaaaaatttagaaatcggttatcaaactgcaattaccaaacctatgagtatagaggtctctaaaggcgatcatatagcaatcattgggccaaatggtattggaaaatcgaccttaattaaaactattgctaatcaacaaaaagcgcttaatggcgatattactttcggcgcaaatttacaaattggttattatgatcaaaagcaagcagaatttaaatctagtaaaacgattttagattatgtgtgggatcaatatccgttaatgaatgaaaaagatattcgagcagttcttggacgtttcttatttgtacaagacgatgttaaaaagataattaatgatttatctggtggtgaaaaagcacgtttactactagcactacttatgttgcaacgtgacaatgtacttattttagatgaacctaccaaccacctcgatatagattcaaaagaaatgttagagcaagcactccaacattttgaaggaacaatactatttgtttcccatgatcgttactttattaaccaattagcaaacaaggtatttgatttaacaattgatggcggaaagatgtatttaggagattatcaatattacattgaaaaagttgaggaagcggaagcgttgaaagcgcaccaagaagaacagtcagttaacgtacaagcacataaaaagtctatggaacaatcgtcgtatcataaccaaaaagaacaaagacgtgaacaacgcaaacttgaacgacaaatatccgagtgtgaaaatgaaatagaaactttagagactactatcttacaaatagacgagcaattaacccaaccagaagtgtataacaatccacaaaaagcaaacgaattagctatccaaaaacaagatagcgaacaaaaattagaacacgctatgtctaaatgggaagaattacaacaaaaactataaaaatatacataactctaactgtaaaatcgctatagttagagttatttttttacaaattttaatttttttattcacaataaaaacgctgatattatagctatccacagacttatcctagttacccacaagtaaattaacactaatcaatcatttattttctgttttcccacctgatatccacaataaatgacgttatcaacaccttttatccacaagttattcactctttgttgataagtacgcacgttctctattgacattgtttttatcaaaattcattgttaagacattttctttatgaaataataataatattgaagtatatttttattattattaaaaataaataaggggatacttatgagcacaaatcaaacatttttaatatttgttatagcaattattctacttacatctgtaataggaattgttggacgatacatgagtcgtcaacgtctattaaaatctatggaaacattatggcaaacgatttctccattagaagcttttatcagaccgaactcacatttcgactatgagtataagctctacaaggaaaaatttgaatcacattcattagttgatgataaaacttggtccgacttaaatatgaatgcaatctttcataagatgaattataatttaacagctattggtgaaatgaagctatatgcctgtttacgtggaatgctttcaattacgaacaaatcattacttagtttatttaatgataatgctgaatttagaaaaaacgtaacatatcatttagctttgattggtaaaactgtttatccaacatttccagaccaaatcacaccggtaaaacgtcaaaatatattgtttctatgcccgtttttaccagttatctcatttgcagttatatttattaattcacaagttggtattttattatttcttatgagttgcctatttaatatcattttatcagcaactttaaagcgtacatatgaggatgacttaaaatctatcttttatgcatccaatgttttaaaacaaggctatactatctcaaaaattaaacatgctccacaacctgaagtcaattttaagcaatttagaacagcacgtcatttaacgagtgttttagctgaagttaatgatgaagatatcggagctatggtaattaaactagttaaacttattttcatgcttgattatgttttatttcattcaattcaaaaaagctatacaacacatatgaatgagcttaaaaattgtttcgattacatagctgaattagataatcattatgcattagcaatgtatcgtagaacgctagaatgttatactgaaccacaaattgatgattcaaatgatggcatagtattctctgagttaacacatccactcatagcagatgcagtagccaatgatttctcactatcacaaaatatactgttaactgggtctaatgcttcgggtaaatcaacatttatgaaatccatagcaataaacattattcttgcatcggctatacaaacagttaccgcaagcaaatttgtatatcaacctggaattgtgttcacgtcaatggcaaatgccgatgatgtgttatcaggcgatagttattttatggctgaattaaaatctattaagcgtattgttgaaattccagataatcaaaaaatatactgctttatagatgaaatttttaaaggtaccaacacaactgaacgaattgccgcttcagaatcagtactatcatttttacatgaaaaatctaactttagagttattgcagcaacacatgatattgagttagctgaactcttaaaacaacgttatgaaaattaccatttcaatgaggtaatagaaaataataacatacattttgattacaaaattaagcctggcaaagcaaatacacgtaatgccatcgaattattaaaaatcacttcatttccagcaaaaatatatgaacgagcaaaagataatgtcccgaaaatttagcatttaactttaaacataaaaacgtcagctatcacatgacagaagactatgaacagtttcaataatgttcatagtaatcatgttaataactgacgtttattttattctgcagaatactcttctaaatctatattgctgtgcccatttaatgctaaatcagcaaatcgaccttgctgatacaaatagtggccggcaacgcctatcattgcagcattatctgtgcataatttaggacttgggatagttaattgaatgtcattgactttgcattgatccgctaaagattgacgtaatcctttattactcgccacgccaccagcaacaattaatcgctgaacaccatattctttacaagcttgaatagctttaaacgtgagcacctctacaacactgttttgaaagctcgttgctacgttagcttcaatgattggaatatttttttgtcgttgattgtgaagttgattgattacggcacttttcaacccactaaaactaaaatcataactatctttatccaaccaaacacgagggaatgaataagtatcttcaccttcagcagccaaccgatcaacttgtggaccacctggataatttaaaccaattgttcgtgccactttatcataagcctcacctactgcgtcatctcgtgtttcaccaatgacttcaaatgataaatgatccttcatataaactaattcagtatgtccacctgaaacaataagtgcaattagcgggaatgttaatggctcttctatgtgattagcatatatatgtcctgcaatatgatgaacaggaataagtggcttatcgtaagcaaatgccaatgctttggctgcattaacacctattagtaacgcaccaattagtccagggccttctgtaaccgctatggcatcaatatcttctattgatacatcggcatcccctagagcctcgtttattgttgctgttataccttcaacgtgatgtctacttgccacttcgggaacgacaccgccaaatcgtttatgactttcaatctgacttaaaactgtatttgataaaatatctctgccattttttataacactaacgcttgtttcatcacaacttgtttcaacagctagtattaatatatctttagtcatttaaattcacccacataaccattgcgtcctcaccttcaccataataatttttacgtttaccaccatattgaaatcctaaattttcatatacatgttgtgccactttattattaactcttacttctaaactcatcacatcacaagtgtgacttgcatagtttattccgtattttaaaagcatttgacctaaaccatagcctctataattatcatcgattgcaactgttgtaatttgagcttgatcgataacaatccataaacctaaataaccaataatttgttgttcaaattctaagacaaaatatttcgcaaagttattttgctctatttcatgataaaatgcgtcaattgtccaagaactgtcattgaaactccgacgctcaagatcaaagacttgtggcacatcttctttagtcatctctctaatgtttaattgttcttttgactgttgatccaatttcgttccgcctcagctaatttatggtatttaggagtaaatgtatgtacgtctgaaggtttatctagcaattgatacatgactgatgcatttggtagctgcgcaatcacttcaccttgtaattcatcttgtaattttacagtatctttcccaatataaataaatggttggtttaaatcttctaaaaaagctcgcaatgcctctatcgacatatattgatcttctaaaatagtcactaattgaccattttgccactggaatatgcctgtataaactgcttgtcgtcttgcatcaaacacaggaaccaataatttatcagtatgatcgattgttgctgccaatgcctttaatgatgaaacaccatataatttaacatctaacgcatacgctaatgttttagcaacagtaacaccgatacgtaagccagtatatgaaccaggaccttcagcaacaataatcgcatctaattgctgtttagctattttgctctgctcaaatagctgactaatcgcaggcattaattgcactgaatgattttgtttagaatccgtagttatttcagctaaaacttcatcgttttgcatcaatgctactgataatggttgattcgatgtatcaatgagcagcgaattcatggataattgcctccttaatttgttcataatgttctccttgcgcgaacaactcaatttgtcttgtattttcagatattgttgaaatgttaatagataaatgcgtcgctggaagtaaatcttttataaattgactccattcaataacagtaattgcctgatcttcgaaaaattcatcaaatcctaaatcttcatcagaatcttctaagcgataacaatccatatgatgcaattttaaatttttacccctatatgatttaatgatgttaaatgtcggggaattaatcgtacgtcttacaccaagagcttttcctataaattgcgttaacgttgttttacctgctcctaaatctccgttaagtaaaatcaaatcaccacttttcaattgctcaactaaaaatatagcaaattgattcatttcatctaaattatttatctttatcaatgttgattctcctatattatgcttttcattcataaaaatgattatccattgttcaatcgtatctaactttatatttaacctttatattgtaacaaatttcaacttaaatttcttatctttgaaacagattatctattcaaagttaattgtaagaaaatttaaaatatttgttgacatactaaagcagatatagtaaattaaatttatcaaatttttagacaattctaactattaaagtgatatataccattcacggaaggagtataataaaatgcttaatcaatatactgaacatcaaccgacaacttcaaatattattattttattatactctttaggactcgaacgttagtaaatatttactaaacgctttaagtcctatttctgtttgaatgggacttgtaaacgtcccaataatattgggacgtttttttatgttttatctttcaattacttatttttattactataaaacatgattaatcattaaaatttacgggggaatttactatgcgaagcgacatgatcaaaaaaggagatcaccaagcaccagcaagaagtcttttacatgccacgggcgcgctaaaaagtccaactgatatgaacaaaccatttgtagctatttgtaactcttatattgatattgttcctggacatgttcacttgagagagcttgcagatatagctaaagaagcaattagagaagccggtgccattccatttgaattcaatacaattggtgttgatgatggaatagctatgggacatatcggaatgcgatattctctaccatcacgtgaaattattgcagatgcagctgaaactgtaattaacgctcattggtttgacggcgtattttacattcctaattgtgacaagattacacccggtatgattttagcagccatgaggacaaacgtaccagctatcttttgctctggtggaccaatgaaagctggcttatctgcacatggaaaagcattaacactttcatcaatgtttgaagcagtcggcgcatttaaagaaggatcgatttctaaagaagaatttttagatatggaacaaaatgcctgccctacttgtggttcatgtgctgggatgtttactgcaaattcaatgaactgtttgatggaagttttaggtctaacattaccatacaacggtactgcacttgcagtcagtgatcagcgacgagaaatgattcgccaagcagcttttaaattagttgaaaatattaaaaatgatttaaaaccacgtgatatcgttactcgcgaagcaattgatgatgcatttgcacttgatatggctatgggtggttcaacaaacacggtactgcatacgttagccattgccaatgaagctggtattgattatgacttagagcgcattaatgctattgccaaacgcacgccatatttatcaaaaatagcacctagttcatcgtattcaatgcatgatgtgcatgaagctggtggcgtcccagcaattattaatgaattgatgaagaaagatggcacgttacacccagatagaatcacagttactggcaaaacgttacgtgaaaataacgaaggcaaagaaattaagaactttgatgtcattcaccctcttgatgcaccatatgatgcacaaggcggtttatctatcttatttggtaatatcgcccctaaaggcgcagttattaaagttggcggcgttgatccatctatcaaaacatttactgggaaagcaatttgtttcaattcgcatgatgaagctgttgaagcaatagacaatcgtaccgttcgtgcaggccacgtcgttgtcattagatatgaaggacctaaaggtggaccaggtatgcctgaaatgttagcacctacttcctctattgttggtcgcggcttaggtaaagatgttgcattaattactgatgggcgtttttccggtgccacaagaggtattgcagttggtcatatttcccctgaagctgcatctggtggaccaattgccttaattgaagatggtgatgagattactattgatttaacaaatcgtacattaaacgtaaaccagcctgaagatgttctagcgcgtcgccgagaatctttaacaccatttaaagcgaaagtaaaaacaggttatctagctcgttatactgccctagtaactagcgcaaatacaggtggcgtcatgcaagtccctgagaatttaatttaatttatttttatattggagatggttaaaatgtctaaaactcaacatgaagtaaaccaaaatattgaccctttaaaaatggctgaatcacttgaacctgaacaactaaatgaaaaaactttaaatgatatgcgttcaggatcagaagtgctagtagaagctctacttaaagaaaatgtggattatttattcggttatcctggtggtgccgtactacctttatatgacacgttttatgatggtaaaatcaaacatattttagcaagacacgaacaaggtgctgttcatgctgcagaaggttatgcacgtgtatctggtaaaactggcgtcgttgtagttacaagcggtccaggtgcaactaatgtaatgacaggtattacggatgcacattgcgactctttacctctagttgtattcactggacaagttgctacaccaggcattggtaaagatgcattccaagaagcggatattctatctatgacttcaccaattacaaaacaaaattatcaagtggaacgtgttgaagatatccctaaaatcgtacacgaagctttccatgtagctaattctggacgcaaaggtcctgtagtgattgattttccaaaagatatgggtgttttagctacaaatgtggatttatgcgacgaaatcaatattccaggttatgaagttgttacagaaccagaaaataaagacattgacactttcatctcacttttaaaagaagcgaaaaagcctgtcgtattagccggcgcaggtattaatcaatcaaaatcaaatcaattattaacacagtttgttaataaacatcaaatcccaacagttactactttactaggtctaggtgctgtaccttatgaggatacactatttttaggtatgggaggaatgcatggttcttatgctagtaacatggcattaactgagtgtgatttactcattaatttaggtagccgcttcgatgatagattagcaagcaaacctgatgcctttgcacctaacgccaaaattgtacatgtagatattgatccttcagaaatcaataaagttattcatgtagatttaggtattattgcagactgtaaaagatttttagaatgtttaaatgataaaaatgttgagactatagaacacagtgactgggttaaacattgtcaaaataataagcagaaacacccatttaaacttggtgaagaagatcaagtattttgtaagccacaacaaacaatcgaatatatcggcaaaattacaaatggtgaagcaattgttactacagacgtgggacaacatcaaatgtgggcagctcaattttatccatttaaaaatcacggacaatgggttacaagcggtggtttaggaacaatgggattcggtattccttcgtcaattggtgccaaattagctaatcctgataaaacagtcgtatgtttcgtcggtgacggtggtttccaaatgacaaaccaagaaatggcacttttacccgaatatggtttagatgtcaaaatcgtactaatcaataatggaacattaggtatggttaaacaatggcaagataagttctttaatcaacgcttctcacactcagtatttaatggtcaacctgattttatgaaaatggcagaagcatatggcgtcaaaggtttcttaatcgataagccagaacaactggaagaacaattagatgcagcgtttgcttatcaaggaccagctttaattgaggttcgtatttcccctactgaagctgtaaccccaatggttccgagtggcaaatcaaatcatgaaatggagggcttataatgacaagaattcttaaattacaagttgcggatcaagtcagcacgctaaatcgaattacaagtgcttttgttcgcctacaatataatatcgatacattacatgttacacattctgaacaacctgggatttctaacatggaaattcaagtcgatattcaagatgatacatcacttcatatattaattaaaaaattaaaacaacaaattaatgttttaacggttgaatgctacgaccttgttgataacgaagcttaattttaagacaaaggcaatgatgcgctaattagttatagatatatcataggctgctagttaacatctgccactattacaaagttatatttcagaattttcgaaacacaaaatatttaattatttggaggaatttattatgacaacagtttattatgatcaagatgtaaaaacggacgctttacaaggcaaaaaaattgcagtagtaggttatggatcacaaggtcacgcgcatgcacaaaacttaaaagacaatggatatgatgtagtcatcggcattcgcccaggtcgttcttttgacaaagctaaagaagatggatttgatgtgttccctgttgcagaagcagttaagcaagctgatgtaattatggtgctattacctgatgaaattcaaggtgatgtatacaaaaacgaaattgaaccaaatttagaaaaacataatgcgcttgcatttgctcatggctttaacattcattttggtgttattcaaccaccagctgatgttgatgtatttttagtagctcctaaaggaccgggtcatttagttagacgtacatttgttgaaggttctgctgtaccatcactatttggtattcaacaaggcgcttcaggtcaagcacgtaatattgctttaagttatgcaaaaggtattggtgcaactcgtgcaggtgttattgaaacaacatttaaagaagaaactgagacagatttatttggtgaacaagcagtactttgcggtggtgtatcgaaattaattcaaagtggctttgaaacattagtagaagcgggttatcaaccagaattagcttattttgaagtattacatgaaatgaaattaatcgttgatttgatgtatgaaggcggtatggaaaatgtacgttactcaatttcaaatactgctgaatttggtgactatgtttcaggaccacgtgttatcacaccagatgttaaagaaaatatgaaagctgtattaactgatatccaaaatggtaacttcagtaatcgctttatcgaagacaataaaaatggattcaaagaattttataaattacgcgaagaacaacatggtcatcaaattgaaaaagttggtcgtgaattacgcgaaatgatgccttttattaaatctaaaagcattgaaaaataagatagacctacaatgaggagttgttaaatatgagtagtcatattcaaatttttgatacgacactaagagacggtgaacaaacaccaggagtgaattttacttttgatgaacgcttgcgtattgcattgcaattagaaaaatggggtgtagatgttattgaagctggatttcctgcttcaagtacaggtagctttaaatctgttcaagcaattgcacaaacattaacaacaacggctgtatgtggtttagctagatgtaaaaaatctgacatcgatgctgtatatgaagcaacaaaagatgcagcgaagccggtcgtgcatgtttttatagcaacatcacctattcatcttgaacataaacttaaaatgtctcaagaagacgttttagcatctattaaagaacatgtcacatacgcgaaacaattatttgacgttgttcaattttcacctgaagatgcaacgcgtactgaattaccattcttagtgaaatgtgtacaaactgccgttgacgctggagctacagttattaatattcctgatacagtcggctacagttaccatgatgaatatgcacatattttcaaaaccttaacagaatctgtaacatcttcaaatgaaattatttatagtgctcattgccatgacgatttaggaatggctgtttcaaatagtttagctgcaattgaaggcggtgcgagacgaattgaaggcactgtaaatggtattggtgaacgagcaggtaatgcagcacttgaagaagtcgcgcttgcactatacgttcgaaatgatcattatggtgctcaaactgctcttaatctcgaagaaactaaaaaaacatcggatttaatttcaagatatgcaggtattcgagtgcctagaaataaagcaattgttggccaaaatgcatttagtcatgaatcaggtattcaccaagatggcgtattaaaacatcgtgaaacatatgaaattatgacacctcaacttgttggtgtaagcacgactgaacttccattaggaaaattatctggtaaacacgccttctcagagaagttaaaagcattaggttatgacattgataaagaagcgcaaatagatttatttaaacaattcaaggccattgcggacaaaaagaaatctgtttcagatagagatattcatgcgattattcaaggttctgagcatgagcatcaagcactttataaattggaaacactgcaactacaatatgtctctagcggccttcaaagtgctgttgttgttgttaaagataaagagggtcatatttaccaggattcaagtattggtactggttcaatcgtagcaatttacaatgcagttgatcgtattttccagaaagaaacagaattaattgattatcgtattaattctgtcactgaaggtactgatgcccaagcagaagtacatgtaaatttattgattgaaggtaagactgtcaatggctttggtattgatcatgatattttacaagcctcttgtaaagcatacgtagaagcacatgctaaatttgcagctgaaaatgttgagaaggtaggtaattaattatgacttataacattgttgccctacctggtgatggaatcggtccagaaattttgaacggatctctatcattgcttgaaattataagtaataaatataactttaattatcaaatagagcaccacgaatttggtggtgcctctattgatacattcggcgagcctttaactgagaaaaccttaaatgcgtgtaaaagagcagatgctattttactgggtgcaatcggtggacctaaatggacagatcctaacaatcgaccagaacaaggattattaaaattgcgtaaatccttaaatttatttgtaaatatacgccccactaccgttgtcaaaggcgctagttctttatcacctttaaaggaagaacgcgttgaaggcacagatttagttatagtccgtgaattgacaagtggtatttattttggagaacctagacattttaataatcacgaggccttagattctcttacttatacaagagaagaaatagaacgcattgttcacgtagcatttaaattggccgcttcaagacgaggaaaactaacatcagttgataaagaaaatgtattagcttctagtaaattgtggcgcaaagtcgtaaatgaagtaagtcaattatatccagaagtaacagtaaatcacttacttgttgatgcttgtagtatgcatttaatcacaaatccaaaacaatttgacgtcatcgtatgtgaaaacttatttggcgatattttaagtgatgaagcttcagtgattcctggttcacttggtttatcaccttctgctagttttagtaacgatggtccaagattgtatgagcctattcatggatcagcaccagatattgcaggtaaaaacgttgccaatccatttggaatgattctatctttagcgatgtgtttacgtgaaagcttaaatcaaccagatgctgcagatgaattagaacaacatatttatagcatgattgaacatgggcaaacgacagcagatttaggcggcaaattgaatactactgatattttcgaaattctatctcaaaaattgaatcactaagggggagatgtaaatgggtcaaacattatttgacaaggtgtggaacagacatgtgttatacgggaaattgggcgaaccgcaactattatacattgatttacaccttatacatgaagttacttctcctcaagcatttgaaggacttaggcttcaaaacagaaaattaagacgcccagatttaacatttgcaacactcgatcacaatgttcctactattgatatattcaatattaaagatgaaattgcaaacaaacaaatcacaacattacgaaaaaacgccatagattttggggtgcatatttttgatatgggttctgatgaacaaggtattgttcacatggtaggacctgagacaggacttacacagcctggcaagacaatcgtttgtggtgactctcacacagcaacacatggagcatttggtgctattgcatttggaattggaacaagtgaagttgaacatgttttcgcaactcaaacgctatggcaaacaaaacccaaaaacttaaaaatcgatattaatggtaccttaccaacaggcgtctatgctaaggacattattctgcatttaattaaaacgtatggtgttgactttggtacaggctatgctttggaatttactggcgaaacaattaaaaacctttcaatggatggtcgaatgactatttgtaacatggctatcgaaggtggtgccaaatacggcataatccaacctgatgatataacatttgaatatgttaaagggagaccatttgccgataacttcgctaaatcagttgataagtggcgtgagctatattctgatgacgacgcgatatttgatcgtgtaattgaacttgatgtttcaacattagaaccacaagtgacatggggaactaatcctgaaatgggtgttaatttcagtgaaccattccctgaaatcaatgatatcaacgatcaacgtgcgtatgattatatggggttagaaccaggtcaaaaagctgaagacatcgacttagggtatgtttttctcggttcatgtacaaatgctagactatcagatttgattgaagctagtcatattgttaaaggaaataaagttcatccaaatattacagctattgtcgtaccaggttctcgtacagtaaaaaaagaagcagaaaaattaggtctagatactatctttaaaaatgcaggatttgaatggcgtgaaccaggatgttcaatgtgtttaggcatgaatcctgaccaagtacctgagggcgtacattgtgcatctacaagtaatcgaaactttgaaggacgacaaggcaaaggtgcaagaacacatttagtatcccctgctatggcagcagcagcagctattcatggtaaatttgtggacgtaagaaaggtggttgtttaaatggcagcaatcaaacctattacaacatataaaggtaaaatagtccctctcttcaacgacaatatcgatacagaccaaatcattcctaaggtacacttaaagcgtatttcaaaaagtggctttggtccatttgcttttgatgaatggcggtacttacctgatggttcagataatcctgatttcaatcctaacaaaccacaatataaaggggcttctattttaattactggagataattttggatgtggttcaagtcgtgaacatgctgcttgggctcttaaggactatggttttcatattattattgcaggaagtttcagtgacatattttatatgaattgcactaaaaatgcgatgttgcctatcgttttagaaaaaagtgcccgtgaacatcttgcacaatatgttgaaattgaggtcgatttaccaaatcaaactgtgtcatcaccagacaagcgtttccattttgaaattgatgaaacttggaagaataaacttgtaaatggcttagatgacattgcaatcaccctacaatatgaatcattaatagaaaaatatgaaaaatcactttaagggagttgaatattatgacagtcaaaacaacagtttctacgaaagatatcgatgaggcatttttaagacttaaagatattgtcaaagaaacacctttacaattagaccattacttatctcaaaagtatgattgtaaagtctatttaaaacgagaagatttacaatgggtacgttcttttaaattaagaggtgcttacaacgctatttctgttttatcagatgaagctaaaagtaaaggtattacatgtgcaagtgcaggtaatcatgctcaaggtgttgcctatacagctaaaaaacttaatttaaacgctgttatctttatgccagtcactacacctttacaaaaggtaaatcaagtaaagttctttggaaatagtaacgttgaagttgtactcactggtgatacatttgatcactgtttagctgaagctttaacttatacaagtgaacatcaaatgaactttatagatccattcaataatgttcatacaatttctggacaaggtacgcttgctaaagaaatgctagaacaagcaaagtctgacaatgttaactttgattatctatttgccgcaattggtggtggcggtttaatttcaggtattagtacttactttaaaacctattcacctaccacgaaaattataggtgttgaaccttcaggtgcaagtagtatgtatgaatctgttgtggtaaataatcaggtagtcacattgcctaatatcgataaatttgtggacggtgcatctgtagctagagttggcgatattacatttgaaattgcaaaagaaaatgtagatgattacgttcaagtagatgaaggtgcagtttgttctacgattttagatatgtattcaaaacaagcaattgtagcagaacctgctggcgcattaagtgtaagtgcgcttgaaaactataaagatcatattaaaggtaaaacagtggtttgtgtcattagtggtggtaataatgatattaatcgaatgaaagaaattgaagaacgttcattactatacgaagaaatgaagcattactttatcttaaatttccctcaacgtccaggtgcattgagagaatttgtaaatgacgtattaggacctcaagacgatattactaaatttgaatacttaaaaaaatcttctcaaaatacaggtactgtcattattggtattcaacttaaagatcatgatgatttaatacaactcaaacaacgtgtaaatcatttcgatccttccaatatttatattaatgaaaataagatgttatattcattgttaatttaacacatagtaagaaaaacagtcataaattgatttctaattgaaatcatcttatgactgctttttattatactttacatttctcgtttcgtcagattcaaacgttttcacttcgccaagccatctttctttgtgtttgcttttattttgacgttttagacataaaaaaagagaccttgcggtctcaatgcggctcatcgcatccactttttgcctggcaacgttctactctagcggaacgtaagttcgactaccatcgacgctaaggagcttaacttctgtgttcggcatgggaacaggtgtgacctccttgctatagtcaccagacatatgaatgtaaattatacattcaaaactagatagtaagtaaaagtgattttgcttcgcaaaacatttattttgattaagtcttcgatcgattagtattcgtcagctccacatgtcaccatgcttccacctcgaacctattaacctcatcatctttgagggatcttataaccgaagttgggaaatctcatcttgaggggggcttcatgcttagatgctttcagcacttatcccgtccacacatagctacccagctatgccgttggcacgacaactggtacaccagaggtatgtccatcccggtcctctcgtactaaggacagctcctctcaaatttcctacgcccacgacggatagggaccgaactgtctcacgacgttctgaacccagctcgcgtaccgctttaatgggcgaacagcccaacccttgggaccgactacagccccaggatgcgatgagccgacatcgaggtgccaaacctccccgtcgatgtgaactcttgggggagataagcctgttatccccggggtagcttttatccgttgagcgatggcccttccatgcggaaccaccggatcactaagtccgtctttcgaccctgctcgacttgtaggtctcgcagtcaagctcccttatgcctttacactctatgaatgatttccaaccattctgagggaacctttgagcgcctccgttaccttttaggaggcgaccgccccagtcaaactgcccgcctgacactgtctcccaccacgataagtggtgcgggttagaaagccaacacagctagggtagtatcccaccagcgcctccacgtaagctagcgctcacgtttcaaaggctcctacctatcctgtacaagctgtgccgaatttcaatatcaggctacagtaaagctccacggggtctttccgtcctgtcgcgggtaacctgcatcttcacaggtactatgatttcaccgagtctctcgttgagacagtgcccaaatcgttacgcctttcgtgcgggtcggaacttacccgacaaggaatttcgctaccttaggaccgttatagttacggccgccgtttactggggcttcgattcgtagcttcgcagaagctaaccactcctcttaaccttccagcaccgggcaggcgtcagcccctatacatcaccttacggttagcagagacctgtgtttttgataaacagtcgcttgggcctattcactgcggctcttctgggcgttaaccctaaagagcaccccttctcccgaagttacggggtcattttgccgagttccttaacgagagttcgctcgctcaccttagaattctcatcttgactacctgtgtcggtttgcggtacgggcacctattttctatctagaggcttttctcggcagtgtgaaatcaacgactcgaagacacaatgtcttctccccatcacagctcagccttaacgagtaccggatttgcctaatactcagccttactgcttagacgtgcaatccaatcgcacgcttcgcctatcctactgcgtcccccccatcgattaaaacgattataggtggtacaggaatatcaacctgttatccattgcctacgcctgtcggcctcagcttaggacccgactaacccagagcggacgagccttcctctggaaaccttagtcaatcggtggacgggattctcacccgtctttcgctactcacaccggcattctcacttctaagcgctccacatgtccttacgatcatgcttcaacgcccttagaacgctctcctaccattgtccaaaggacaatccacagcttcggtaatatgtttagccccggtacattttcggcgcagtgtcactcgactagtgagctattacgcactctttaaatgatggctgcttctaagccaacatcctagttgtctgggcaacgccacatccttttccacttaacatatattttgggaccttagctggtggtctgggctgtttccctttcgaacacggaccttatcacccatgttctgactcccaagttaaattaattggcattcggagtttgtctgaattcggtaacccgagaggggcccctcgtccaaacagtgctctacctccaataatcatcacttgaggctagccctaaagctatttcggagagaaccagctatctccaggttcgattggaatttctccgctaccctcagttcatccgctcacttttcaacgtaagtcggttcggtcctccattcagtgttacctgaacttcaacctgaccaagggtagatcacctggtttcgggtctacgaccaaatactaaacgccctattcagactcgctttcgctacggctccacatttactgcttaaccttgcatcaaatcgtaactcgccggttcattctacaaaaggcacgccatcacccattaacgggctctgactacttgtaagcacacggtttcaggttctatttcactccccttccggggtgcttttcacctttccctcacggtactggttcactatcggtcactagagagtatttagccttaggagatggtcctcccagattccgacggaatttcacgtgctccgtcgtactcaggatccactcaagagagacaacattttcgactacaggattattaccttctttgattcatctttccagatgattcgtctaatgtcgtcctttgtaactccgtatagagtgtcctacaaccccaacaagcaagcttgttggtttgggctcttcccgtttcgctcgccgctactaagggaatcgaattttctttctcttcctccgggtactaagatgtttcagttctccgggtgtgccttctgatatgctatgtattcacatatcgataacatgacataactcatgctgggtttccccattcggaaatctctggatcaaagcttacttacagctccccaaagcatatcgtcgttagtaacgtccttcatcggcttctagtgccaaggcatccaccgtgcgcccttaataacttaatctatgtttccaccatttttataagtcaaacgttaacatgaagttacgttcttttataaaaagatttaaacgcgttattaatcttgtgagtgttctttcgaacactagcgattatttcttatgaattcaagcttatttaaaactctttattcactcggttttgcttggtaaaatctatattttacttacttatctagttttcaatgtacaatttctttttagtcaagcgctcgcatactgctttattttcataagcaatatcactttaaccaaaaaaatttgaatgaataaacattcaaaactgaatacaatatgtcacgttattccgcatcttctgaagaagatgttccgaatatatccttagaaaggaggtgatccagccgcaccttccgatacggctaccttgttacgacttcaccccaatcatttgtcccaccttcgacggctagctcctaaaaggttactccaccggcttcgggtgttacaaactctcgtggtgtgacgggcggtgtgtacaagacccgggaacgtattcaccgtagcatgctgatctacgattactagcgattccagcttcatgtagtcgagttgcagactacaatccgaactgagaacaactttatgggatttgcttgacctcgcggtttcgctgccctttgtattgtccattgtagcacgtgtgtagcccaaatcataaggggcatgatgatttgacgtcatccccaccttcctccggtttgtcaccggcagtcaacttagagtgcccaacttaatgatggcaactaagcttaagggttgcgctcgttgcgggacttaacccaacatctcacgacacgagctgacgacaaccatgcaccacctgtcactttgtcccccgaaggggaaggctctatctctagagttgtcaaaggatgtcaagatttggtaaggttcttcgcgttgcttcgaattaaaccacatgctccaccgcttgtgcgggtccccgtcaattcctttgagtttcaaccttgcggtcgtactccccaggcggagtgcttaatgcgttagctgcagcactaaggggcggaaaccccctaacacttagcactcatcgtttacggcgtggactaccagggtatctaatcctgtttgatccccacgctttcgcacatcagcgtcagttacagaccagaaagtcgccttcgccactggtgttcctccatatctctgcgcatttcaccgctacacatggaattccactttcctcttctgcactcaagttttccagtttccaatgaccctccacggttgagccgtgggctttcacatcagacttaaaaaaccgcctacgcgcgctttacgcccaataattccggataacgcttgccacctacgtattaccgcggctgctggcacgtagttagccgtggctttctgattaggtaccgtcaagatgtgcacagttacttacacatatgttcttccctaataacagagttttacgatccgaagaccttcatcactcacgcggcgttgctccgtcaggctttcgcccattgcggaagattccctactgctgcctcccgtaggagtctggaccgtgtctcagttccagtgtggccgatcaccctctcaggtcggctatgcatcgttgccttggtaagccgttaccttaccaactagctaatgcagcgcggatccatctataagtgacagcaagaccgtctttcacttttgaaccatgcggttcaaaatatcatccggtattagctccggtttcccgaagttatcccagtcttataggtaggttatccacgtgttactcacccgtccgccgctaacatcagagaagcaagcttctcgtccgttcgctcgacttgcatgtattaggcacgccgccagcgttcatcctgagccaggatcaaactctccataaaaattatgatgtttgattagctcataaatactaaataatgtttgtaacttatagttacgtttttggaattaacgttgacatattgtcattcagttttcaatgttcattaaaattatctatggagcgggtgatgggaatcgaacccacaacatcagcttggaaggctgaggttttgccattaaactacacccgcttatttaaattaagaattttgatgcggccgagaggacttgaacctccacgggatttctcccactaggccctcaacctagcgcgtctgccattccgccacgaccgcggatataggcatttaaaacatcttcgtttttcagaacgttatttattatattatgtttaaaaatatttgtcaataacttttaatcgtttttttacattaaattaatttgtgttatcagttgttaacacaacgctatttataataaaacatttagaacttattgtcaacatattttataaattaaatttagaattgactgtcttgataaagtccgtataattgtgtaaaagtaaaaaggccatataacagtccttttacggtacaatgtttttaacgacaaaaacatacccaggaggacttttacatgacccaagtacattttacactgaaaagcgaagagattcaaagcattattgaatattctgtaaaggatgacgtttctaaaaatattttaacaacggtatttaatcaactaatggaaaatcaacgaacagaatatattcaagcaaaagaatatgaacgaacagaaaaccgacaaagtcaacgaaatggctattatgagcgcagctttacgacacgtgtaggcacgctagaattaaaagtacccagaacacgtgatggccatttttcacccacagtgtttgaacgttatcaacgaaacgaaaaagccctcatggcttcaatgttggaaatgtatgtatcaggcgtttcaactcgtaaagtatcaaaaattgtggaagaactttgtggtaaatccgtctctaagtccttcgtttctagcttaacagaacagctagaacctatggttaacgagtggcagaatcgtttattatcagaaaaaaattatccttacttaatgaccgatgtactctatataaaagtacgagaagaaaatcgagtactctcaaaaagctgtcatatagcgattggaataaccaaagatggcgaccgtgaaattatcggcttcatgattcaaagtggcgaaagcgaagagacctggacaacattttttgaatacctaaaagaacgcggtttacaaggtacggaactcgttatttctgatgcgcacaaaggattagtctctgccattagaaaatccttcaccaacgtaagttggcaaagatgccaagttcacttcctaagaaatatctttaccaccattcctaaaaaaaattcaaaatctttcagagaagctgttaaaggaatttttaagttcacagatattaacttagcgcgtgaggctaaaaatcgattgattcatgattatatcgatcaaccaaaatattcaaaagcttgcgcatcattggatgatggattcgaagacgcctttcaatataccgtacaaggaaattcccacaatcgactaaagagtaccaatctaattgaacgactgaatcaagaagtacgcagaagagaaaagattattcgcatcttccccaatcaaacatcagccaatcgcttaattggagccgttcttatggacctacatgatgaatggatttattcttcaagaaaatacatcaattttgataagtagaaatggtaaaaacattgtatagcattttacacaggagtctggacttgactcacttcctttattatttttcatttttttaaactatttaatactaatgtcttttataatagcttttcatatattatataatcaatctttataagtccttttataaatttcttttctaccattttcgataaattcctgtttaatatttttaattccataaacaatagtttcaataggataatattcttcaactatatcttgatattcttttgctttctcaatatctatatttccatacattcttaatatatcttctccaaaatttgttcctatttcttcttcactatcttcaagtaagtatataaaatcacaatattcatctataattccagaatctccaaaatcaattattccagttaatctattattgccatctaacaatagatgattacaactaaaatcattatggcataaacactttttaccctcaaaaactgttgttgcatttagtctttccataaaactttctatataatctttttctatatcagttaaatcattataaatagtttcacgcaacaatatatactcttctaatacattttgtttattatcaatagtacattcactaatatctgtataatctaaaccgtgcatttgtcttaaaaaactggcaatatctcgttttaacaaattttgttcttcttctgacatagtagaataaatttctggtgttaaaaaagttcctttaatttctttataacctagtatagataattcatcactaatatacgaatattcaatattaggaatttttacattagtttctaaatttgtatttaaaaaattatatattgctttttcttttgcataaccttttttcttattagtactaaattttgttttaaaaatgtattcattattaactaaatatgccacactatcataaccactaccgattatttcaatactatctactttgaaattatcaaagtaatgctcaattaaatatttcattgccttaacatttgtggcattatcatcatatctatattccattaaataacaatcttcttttttgccctcgtgtaattcatgttctggcaaatcttcaataattctaaaaccagatttttggtatgcccttattgctcttggattatttttatgagggtctaaaataactgcattagcatttctttcttttttcaaaaattcaaaaatcaatttaatatatcttgtaccaattcctttactccaataatttggctctcctataaattgatccataccatagactatctcatcagtttttggataatgataatcagtatataactcatcatacattttatatatttgtccatatccaataggaacattgttatattcaataattactctaaaaccttcatcttcccaaggctctgtataatgtttttttaatgattctaatgtatattttttatctctaccaccataaaattctaatactctttcatcagttaaccattttaacatcaaaggaaaatcatcatctattaaagttcttatacatatttcattttcaactatattcatttatttatcacctttttcataatcatatacatatactatttcatctttataatcatttttaccacctaatttttcatatacatggcaagctctaggattacctttatcagttattaaaaacatttcagaacaaccaatctctttagaatattccttaataaaagataataattttgaaccataacctttgtcttgatagttaggtaacattcctattgagtgtaaataaaacattgtttttccatcaggtcttaaaagtgtatagcaatatgcaaatcctataattttattattttctttagctataaacccaaatgaactggtatcattaagaaatccttttaaattatcaatatcaaaaaccatattatcatcaattaaaacttcttccataaactcagtcaagtccagactcctgtgtaaaatgctatacaatgtttttaccatttctacttatcaaaattgatgtattttcttgaagaataaatccattcatcatgtaggtccataagaacggctccaattaagcgattggctgatgtttgattggggaagatgcgaataatcttttctcttctgcgtacttcttgattcagtcgttcaattagattggtactctttagtcgattgtgggaatttccttgtacggtatattgaaaggcgtcttcgaatccatcatccaatgatgcgcaagcttttgaatattttggttgatcgatataatcatgaatcaatcgatttttagcctcacgcgctaagttaatatctgtgaacttaaaaattcctttaacagcttctctgaaagattttgaattttttttaggaatggtggtaaagatatttcttaggaagtgaacttggcatctttgccaacttacgttggtgaaggattttctaatggcagagactaatcctttgtgcgcatcagaaataacgagttccgtaccttgtaaaccgcgttcttttaggtattcaaaaaatgttgtccaggtctcttcgctttcgccactttgaatcatgaagccgataatttcacggtcgccatctttggttattccaatcgctatatgacagctttttgagagtactcgattttcttctcgtacttttatatagagtacatcggtcattaagtaaggataatttttttctgataataaacgattctgccactcgttaaccataggttctagctgttctgttaagctagaaacgaaggacttagagacggatttaccacaaagttcttccacaatttttgatactttacgagttgaaacgcctgatacatacatttccaacattgaagccatgagggctttttcgtttcgttgataacgttcaaacactgtgggtgaaaaatggccatcacgtgttctgggtacttttaattctagcgtgcctacacgtgtcgtaaagctgcgctcataatagccatttcgttgactttgtcggttttctgttcgttcatattcttttgcttgaatatattctgttcgttgattttccattagttgattaaataccgttgttaaaatatttttagaaacgtcatcctttacagaatattcaataatgctttgaatctcttcgcttttcagtgtaaaatgtacttgggtcatgtaaaagtcctcctgggtatgtttttgtcgttaaaaacattgtaccgtaaaaggactgttatatggcctttttacttttacacaattatacggactttatcactgtctttcaaatcaaagtttatttaatttgttcttttttaaggaacgtgtttaatcatactaactataagctgtacagtcaatagaaaagttcaatcaaaatgtcatgaaaaatgtataattatcttttgtgctactttaaagctttaattgggtaaagtttatatattaattattactaaaatacgccaagatttttaatctaatcattttaatttcatcctatcaagccacaatttatgccattacctatatcataagtagaaaagccgagattgcgaagtattaaattacgacaatctcggctttaaacattttataaacacaatttcttcttattcaattactatgtttaccaatcaaaataactcactgataaattctatataaattccatacaactcataaataatcttacatatacacgaattagctctatttgtattgtacttatttcaattgtcttttcattcttaattttccattgcaatgtccgcaacgcatacgattcgtatcaactttacggatacgtatatattttgcatgacatttagtgcaataatattcataatttgcccgttgttgatagctttcaatgctgttacaaaatctaggcgctccaacctgttggctcaatcgtttaaaatcttgatctttatgttgataacctttaccagcaatatgcaagtgataatgacacaattcgtgcagtataatttttacaacagcatcttctccataatgctcatattgttttggattaatttcaatatcatgggactttaaaagataacgtccgcctgttgtacgtaaccttttattaaaatatgcacaatgtcgaaacgtacgtccaaatttttcttccgaaagattctcaaccattcgctgaagtttgtcattattcatgtggatcaatcatcgttaatgatactttgtctttatttttgtcaatactgtaaatccaaacgtcaacgatatcaccaacactgacaatatccattggattttttacgaacttcttagaaagtttcgaaacatggacaagtccatcttgtttaacacctatatctacaaatgctccaaaatctactacatttctaactgtaccactcaatttcattccttcttgtaaatcttcaattgatagcacatcggatttaaggattggtgtttcaaactcgtcccttggatctcgattaggtgctttcaaggatttaataatatcctctaatgtaggtacaccgacttgtaattcaatcgccagttcatccatatccaatgaatttaatttagcttttaatgcatcactacctaaatcattgccaccaaatccgagtttatctaataactgatacgttactttatagctttcgggatgaatcgatgtattatccaatggctctgaaccgtctactattcttaaaaatcctatactctgctcaaaagttttagcacccaaacgcttaatcttgcttaactctttattatgctttattgcgccattttcttctctatatgcaattatatttttagcaatttgcgaacttagaccagacacatattgtaataatgatgatgatgctgtattgacatcaacacctacttggttaactgctgtttcaacaacgaaagttaatgcattttctagtgctttttgattaacatcatgctggtattgtccgacaccaatagatttaggatcgattttaactaattcacttaatggatcttgaacgcgtcgtccaattgatacggcacttctttcttccacttgaaaatcaggaaattcatctctagcaatttctgatgctgagtatactgaagcgcccgcttcattgacaatgatgaattgtactggcaactgatgctttttaattaaatctgcaacaaattgttctgtttcacgacttgcagtaccattgccaattgcaattaattgcacatcatacgctttaaccatttgtacaaaatccttctctgctgcctcttttttagaaactggtggatgcggataaatcacaccttttgctataaaagtaccgaatgggttaatgactgctaatttacaacctgttctaaatgctggatctacgcctaatatttgtttacctttcattggaggttgcagtaatagatttcttaagttttcactaaaaacatctattgcatgattttcagctttttcagttaaatcagcatggatttcacgctctatcgaagggacaattaagcgtttcaagctatctttaatcgcctctaaaatataactgcgatttacattattatgattgatttcttgacgtgcaatgaaatcctctactgatgtcgtatcgaattcaaactttacagataatactttctctttttcaccacgattaacagctaaaactctatgattagcaatgcgtttaattggctcactatatgcatagtacatttcaaaaatacctttttcatcttcagcatttttctttttagatgtagttaacacaccttgatgatacatatcttttaaaatttttgttctatatttaggattatctgaaatttgttccgcaataatatcttgtgcacctttgatagcatcttcaaccgattgcacttcttcatttataaattgttgtgctttttcttcaattgagacttcatgtttacgtgccttcatccatatcgctaatggctctaaccctttacgtttcgcctcagttgcccttgtctttttcttttgtttaaaaggcctatataggtcttcaacacgttgtaatttgttctgttttaaaatatccttctttaattcctcagtaagtaatccttgctgttctatatttttgataacttcttctttacgtttttgtaaattgaccatatattggtattcgtcatcaatttgctttatttgaacttcatctagtccaccagtttgctcttttcgatacctcgcaataaatggtactgtatttttttcttctagcagtgttaatactgcttcaatttgttttttactaaattgatatttctctatgattgaattaatcaattgattgtccatttacttaacccacactttttcttaaatttactcatttattttaacatattctaaaatacttctattaaggtatgatacttaatgtaattttcacttccaaaacatttaaaacgaatgattaggtcatactatattttaaaacgcactaagattattgaaaatgacacaccatcatttctaaatttcataatctaagactactttttttattctaatagcaacccacctatttaaaacgacaattagatatcttcttcacttaaattattaatactatatcgcgacatttatgtggatacacattaaactacactaataatgtattaattcgaaaatcttaattaaattaaaaatacccctcgatttcaatttaataatcaagggataattatatggatttttcattataaaacgtatcattaataaacaaattctattgatgtgctgcttcttgtaatttcttaattgccgttctctgaagtcgtgatacatgcatttgacttaaaccgatacgctcacctgtctctttttgactcaatccttcaataaacgtacattgtatgatttctcgttcgcgatcagataatataggtaatattttttctaaaatcatacgtttttcagttaagtcataatggtcatcttgttgccccataatatctaatagcgtaacagttgaaccatctttatcagcttcaatggaatgatcaacacttaacgcattataactttgtcccatttccattgcttctaacacttcttcttctgagacttctaatcgatcagctatttcactgatagaaggtgaacgctctaattcagcggttagttcatcgctcacttttttgattcttggcccaatttctttaatacgtctcggaacatgtacactccaagttttatctcgtagatatcttttgatttcaccgattacagtaggtactaaaaaggcttcaaacttccgttcaaaggacatatcgaatctatttatggcacctattaaaccaaccataccaacttgaactaaatcttcgtgatgtgattgtcctttagaatatttatatgccaatgactcaattagtttttggtaatgtttaactaacttatcctgtgcatctgtattcttattttcttggtgttctttaatccattggttaatttgctcaggtgaaatttcattagctgatttcgactctttcgccattatttcgcacctgctctttttttatatacttagtcatactgattgtcacaccagattctttatatactgtgacttcatccattaaagattcgattaaaaataaacctaggccaccttcgcgtaaaaagtctatattttcgtctttatcgtaaggacctatttttgatttagttgtttcataatcaaaactgtcacctttatcagaaataacaattttaattttatcttctaaaatttcaaaatatatgttaataatgcccacattgttattttctttgtatgcatgtttaactgcatttgtcacagcttcactaactgcaatcttggcatcttcaatatcatcatatgtagcaccagctctcgaaaaaacgccagaaagtgttaaacgaattaaacttacatactctgccgatgctggcacgcgcatttcgataaaatcttctttagattgcatgttattcgacctccgttccttcattaacatgcattaaatccttaagaccagtaatttcaaatagtctaccgatacgatctgacacacctaaaatgtatagttctttatcattttggtttaatgcttttaatgtacctacgaataaacctaaacctgtcgaatccatataactcacattttctaaattaacataaatatcacgagttccatcttgtctcataggtgttaaaacctcttctaattcaggcacagtataaacatctaattctccaccgactttaacttcgtaaaatttatcttgagtggttgtttctatattaagattcatttcattacactcctacttattaaaaatatttatcttcattttaagcgctgtatccaccatatttatatttcaaattattatatacccatcgaaataatttctaatcttcttttttaaattaatttactctttttataatcaaaatagtcatatcatcttttttatttgggttttgaagctttaaaattgcttcatagataatttgaacaatatcttgtgggtgcatatgtttatgttttttaatatattctaaaagtttttgtttatctataaaggtaccttcactatttctagcttcagtcacaccatccgttaaaatgataattaaatcatcaaggtatattggaatttcttgttgttgatatcgtgtttgtgaactgattcctaacactctacctctaactgaaatttcttcaaattcttctttttcagcgcgataaatatatccaggctcatgaccagctgaactacaatacaataaatggttcatttcttcatataaaccataaaacattgtgacgaacatattttgattaatattcttttcaacaacacgatttaaacgttttaaaccatcactcggtaattgtgagtgtccataagaatccatgccaaactttatcatactcattgctaaagcagctggtataccttttccaatgacatctgcaacagcaaagctcattgtgccatcgttatggtcaattaaattaaaataatctccacttactttttgtgccgccactgaaataacgccaatttgaatactatcaaattgtggaatatctgttttaagcattgtttgttgtaagctagaagctaagtctatctctttatcgtgaacttgaagtttatctaccaatctttgataatctcgataactataaccaaagcctttaacgatttcttgtaagacatctaatgtcttgaacacatcttcacgcgttaagtttaacgtcaatatatagtttttgtgaatatcgacaatgtcttcaggcaagacgtccttacgaatcacttcgtcagtgtatttctcacacttttttatcaattctactttatcttggcacgttaaactttcatcaattaaacccttataatgttgcttaaattcttccacgattagttgcctcctcacttcccttacaaagcaaatgcttaagcaaggataattatgattcacttactaacatttatttaattgcacttatcaattttgtcgtttgcaattttgctgtagatgatacttttaagctaaaaaaactttaggatggaatacctaaagcctaaaaaacttaagacatccttttataataaaaaatatgaatatcataactggtatttgctaaaatctttgtttataagaaaattcttcgtacagaatttagaaatagttataattattataaagttattgtcttttatatcaatattttatttatctctgaaaaatacatataatagacgcctaatttttctggtgagctactgcattcagccctaaactaatcattagtgcattatctacttctttcattttatcatcggataagtacgtcagtttttctttcaatcgttttttatcaagtgtacgaatttgttctaataatataactgagtctttatccaacttatactttttcttttcaatctctacatgtgtcggtattttcgctttattaatcctaccagttattgccgcaacaataactgtaggactatatttattaccagtatcattttgaattatgactacaggtctgactcccccttgttcagatccctgtactggtgataaatctgctaaataaacatctcctcgtctaatcattcattcgttgaattagaagataaatatgtttcgttgcaatcgcatgcttcacactctatcggaaaagcttcgttcgctagggagagatttaaatcagccatttgtgaatatccttcttttaaagattgttctaagctatgacttctattttgactaaaagataacatatgagaacctccaattgattccaaaagttattaaatgacctttaattactctaatgataacaaattttatatgcactgaccatattattttaacaattcatttgttacaaaacgttgatcaccatcatgatagattcgcggcaaacgtctcgacaagttacaaagcacttcataattaatagtatgttgcttttcagctaccacctctaccgactgtggactttctctatgattatctattaaaatcaccgaatctccagctttaacttgatctggcactttaacaattgtctgatccatacatacgcgaccaataacttcgcattgatgaccatttacatttacaaagctaccttgcattatgcgtaaatagccatctgcatatccaataggtaacaatgctattgtagttgggtcagtagctgtataagttgcaccataacttacagactcacccgcttgtagcgtctttgtttgaactacattagcaattaattgcacacttggtttaaggtgtactttaactttttgctgtacatactctgatggataatatccataaagggaaattcctggtcttattgcattacagaattggcaatccattaatagagagcctgctgagttctgacaatgtatatattcaggtttaattgcttcattgaccatatctttaaaacgttgatattgttcagttgtcatatctcctggttcgtcagcacaggcaaagtgtgtaaacacgccttcaaatacaagttgctcatattgttgaatgatttcaatcacttcttgatacgttttagtatctttaatacctaaacgtcccattcctgtatctaatttaatgtgcaaccataactttttctcttgctcaccagaaatgtttttaattgcttctttcaaccactgtttagacggaaccgttaaggcaactcggtgttgtatcgctttatcaatatctttagctggtaacacacctaagactaaaattttagcagtaatcccatgcattctaagttctatcgcttcatctaacgttgctacagcaaaaaatgtggcgccattttccattaaatgacgtgctactttaacactacctagtccataggcattggctttaacgacagccatcactgttttatttggatgcaatgtactgaatactttgaaatttgatgcaacagcgtttaaatctacattcatatacgcagatctataatatttatccgacatattacttcctcctgtaattcccacacgttttaaaactagatcttaattatcattgtataacaaatttaaaatgctgacttttctaaaacaacttggctcatcgcataatgctcagtgtgtgagatactaacatgtacgataaacccttcgtaatcaatctttggtttgccaagttcgtcgttgtaacagtctatatcgttaaaagctacatgttttcctaagcctgtgcctaatgctttactgaacgcttcttttgtagcaaacctgccagctaaaaattcaattttacgttgctcatgtgtgaaattgttgaatttgtgctgttcatttttagttaaaatccgctcaaccaattttggttgcttactatataacgcttgtattcgatcgatttcgattaaatctacaccaattccatgtatcattgattattcctcatttttattgttttctaaatgtctctcgttatttaaccatcgtttcaatctacgtgcttcacttctatctattaattcaatttcagcttgaccacccgctgtataaagggtcaaagttgctaatcgatagcgtctcattataggaccaacatcgatatcaatattttgaatacgaaaatatggtattaccttttcatccaaaaataaaatgccgtttcgtacacgcaaatggtgtttttcaaatgcatatctgcagtgcttatatcgatagactggcgctataacaagcgtgaaaacagcaacaagtaatattataatcacactactaacaatggataaatggttatctaaaatctcccaaaatagccagttcaaaatattaaatgcgattaaaagtacaagcgctatgggtatccaaaacagcacagcacttaacctcatcacttttttagcgtgtggtgacataaaattataatccctcatcattttcacctcttaaataccatgatttcaatttatttgcatcttcacttcttgcgtattttaagttaatcgattgggctcccacacctttagcaacaataaagctaaaattatttaaattgttgcgtttaagtaatgtatgttgccaagtgtcaaatcctataatgtgatgcgctttaaaataataaatatttcgtttcaatagctcgaaattctggatagtaatttgttcttctgtcattttaaaacccgcatgtttgacataaagatatcctttgatcacaaataaaccaataatgactattgttataatcgtaaataacaataataattgattccaaaaataacagcctatacctgccatagctatgacaataatactaggtattaaaaagtgtctgtggaaacctgacaaaggcataccttcattaacttgttgataagataaatctggtactaaattctggataatttgatatgctttgtctcgtttaataaacggcaatatcggcacactacctgaatcattgtcatcatcttcgatttttttattttcaaaatcacttgtgatgataaaatgtattgctgtgtagccaaataatcttcgtatatatgactgacgttcaacaacagcttgcaatcgtttcgttggtacagttactttcttcttgttaaagagaccatattcaattttaagttgctcattttcaagcatcaccgaaaagccataaaatcttatcattgttataatcgttccaataatatatgccactattaatactagtaaaatgatgattaatactgaaatacttacaatttgaacccattgactaatttcatgatttagcttcgaccatgggatcaactctcttacagccccgtaaatcggtactaaagctgctaacgttacaccaatggcgccactggtcattgccataaatagtgattctttaaaattcatctgatatataggaatgcgtttatttttctgattaagcatactatcagtgttctgcacttcatctaagcgaccttctgcgatgtcttccacattaccttcaatgtcatgattacagttgtcattcttctcagcactagacttttgcgccacttctgtcttcaactctgtttgcaattgatcaatatatcgttcaagatattcaccttgttttttcgaaataacacttaagacaataccatcacttggtgttttgatttgtaaatccacaccaccaataatttgattgacgaccccttgtgtcatatcaacggactgaatacgttttatatttaattctttacgctttttattaaaaatacctgttgttaaaatgaaataattatcctcaatccaatatcgcgtgttcataattccgacaatttgagaaatgtatgatattaaaaagaatacaaatacaatacctatccataaatatgattcgggattcgtataatcaaaatctttcaattgaaagataatgaaaataaaaaagacgactatgttttgtttgatagcattgattatgccattaaaatatgaaatcggatgtaatttttgaggttcagacatcactttcaacccctctcaaattcgacatagttctctcttcgattattttaacatcgtcatgagacatcatcggtaaataaatagtatgacctgcagtcataaatccaactttatacaaattaagcactttactaattggattagatttaatcgacaagtattgtaaacgttcaattcgactcgtttcttctttatatataaaaaatgatgtacgatattgtacacttagttgatcaactttataaaagcgacaatgatattgccataaaggcttaataaataattttaatgtactcagagcacctaaaaccaacaaaatataaagtaagtaatgtggccattcaaatcttaaccatataaaataaaaaatgacatacacagctacactcaatataaattctaagccattcgtaatgtagtaatacaacaatgctgacttaggactcttagtcaacttagtataatctgacatatacccctctccccaaataaaaaattatacggatttataatctatttcattttatttttatatgatgataattatagcatatggaatatttcatgctaatttattcttcctaaaggtacatctaaaaatttaattaagcagaaagtgcttgaattgctaaaaagacaccatgtataattttatcaacatgatgcctttcatctataatcaatctttcatcttatcaagagcgatatttagttcaagcacattcacataatcatttgttaacacaccacgctgcttacgatgttgaatcaagtcggccactcttgaagtagatacatgacgagcatcagcaatacgaggtgcttgcttcaatgcattttcgaccgtaatatgcggatctaagcccgacccagaacttgttgcagcatctattgttacatttgaattcccaaatttaacatgatgtttcatgcgtgctattaattcggtgtttccattcgattcattacttccacctgaagatacgccgtttttatataatttttcaggattcatattataatcaactgcactcggtctcccgtgaaaatatcgtgtctctgtccagtgctgtccaatcaattttgatccaactatacgattgtcatacgtaattaaactgccatttgcttgttgataaaaaaatatttgaccaattaacgtgatagctaacgggaataaaaatccacataataccatagttattatcgttaaacaaatactatttcttatcgtattcatggtacaggctccttcctctttacacaaaaaattgtacaatcatatctattaatttaatgcctaaaaacgggacgattaatccacctaatccataaatcaacatattatttataaagattctatcaatgctgtaaccctttacttttacacctttcatggcaattggaattaaggcaacaatgattaatgcattgaatatcaaagctgatataattgcagatttaggtgacgataaatgcataatatttagtgaagtcatttctggaattgttgacatcattagtgcaggtaaaattgcaaagtattttgctacgtcattagccaaactaaatgtcgttaatgcacctctcgtcattaataattgtttgcctatttttacaacctctattaactttgtaggattcgaatctaaatcaattagattagctgcctctttagcactaattgtccctgagttcatagctaatcctatattcgcttgtgctagcgcaggtgcatcatttgtaccatctcctgtcatcgcaacaatatggcctttcgcttgttcatctttgatgactttaattttatcttcgggtttacactctgcaacaaatctatcaaccccggcttcttttgcaattgtagctgctgttaaagcattatcacctgtacacataactgtttcaatccccatttttctcaattcagtaaatcgttctacaagaccatctttaatcacatcttttaaataaatcacgccaagcatgacattgttttcaatgactattaatggtgtgccacctttactcgatacatccatacagagagactcaatattaagaggaatattgccttgttgttgtttgacaagatttatcatactattaggtgcacctttgaataccgatatttcatttgtaatgattccgctcattctagtttcagctgtaaaaggcttatatgtgccatcaatgtctttaggcagctcatttatatacatctgcttcgctaatcgtacaatactttttccttctggcgtatcatcgtagattgatgacatataagcagcgactatcaatttttcaagcatttgttgattcactggtaaaaattcactagcgattcgattgccataagtgattgtgcctgtcttgtctaaaatcattacatcgacatctccacatacttctacagcacgcccacttttcgctaatacattgaattgagtaacacgatccatgcctgcaataccaatcgccgataacaaaccaccgattgtcgttggtattaaacatactgttaacgcaatgagcatcgcaataggtaaaattaaatgcaggtaagatgctattggatataacgttacaataacgactaaaaatataattgttaacgttgttaataatgtaaaaagtgcaatttcatttggtgttttatttctttccgccccttcaactaaggcaatcattttatctaaaaaagatgtacccgcttcactctcaacacgtatttctaaccaatcagatgttacaagtgtaccgccaatgactccatcaaaatcgccacctgattcttttatcacaggtgcagactcaccagtaattgcagattcatcaacggttgctaatccatttattacaacgccatcagcagggattgtttctccattttctacccgaatattttgtccggcttttaactctgtggcgttcactatccgatacgcaccattttcttctatcaatcgagcagttaaatttgattgtgcttgtcttaaactatcagcttgcgcttttccacgaccttcagcaaaggcttctgaaaaattagcaaacaatatagttattaataatatgataaaaattgtaatcaaataacctcgcgatagatagctagttccaaatatgtcaggaaaacatattaatatcaacgttaaaatcattccaacctcaacgacaaacattatcggattttttattaattgtttaagattcagcttataaaaactcattttcaaagcttctatcaccattgtttgattgaaatatttatttacatgatgcattttttccatccctttactttattttaaagttaaaaattcaccaataggaccaagtaatagtactggaataaatgtcaaaccacttagtaaaacgataaatacgattagtgatacgccaaaataaggtttatcaatcgctattgtatatttatcttgatggtatgattttttattcactaaacttgatgcaatcattaattgcaaaataattggtatataacgagaaagcaacataatgattcctgtagagatattccagaatgttgtatcatctttcagtccttcaaaccctgatccattgttcgcagcagctgatgtcatttcatacataacttgtgaaataccatgaaaagacggattcgttatactttcacttgctccaggaatcataaaagcaagtgctgaaaatactaaaattaaaattgggtgtatgagaaagactaagacaatacatttcatttcacgggcgccaattggcatatttaaatattctggtgttttaccaaccatcaaactgcatataaacaccgtcagtaagacaaatatcaataaattcatgagtcctacgccttcgccaccaaatacaacatttagcatcattaataccattggtcctaatccacctataggcgttaagctatcatgcatgttattaacagaacccgttgtaaatgccgtcgtaataactgtaaatagtgctgacaaacctgctccaaaccgtacctctttaccttccatattcggtccataaatgcctaaattcgctagtattggattaccacgatactcactccacatagttaatgtaagaattgctataaaaatgaaaaacattgcgacaaataatatcaacgcatgacgatgtactcgtttaccatgtctacttaacatgcgaccaaataagaacaacattgacataggaagtaacatcatactgcccatttctataaaattgctccaaatatttggattttcaaaaggtgttgcagaatttcctgctaaaaatcctccaccattcgtaccaagatgttttattgattcaagtgatgcaataggtccaaatgcaatatgttgaatatgtccgcttaaagtccgaatcattaaattagcatgcaacgtttgtggtacaccttgagtcatcaataaaatactaattaaacatgataatggtaaaagtactcggacaataaaccgaacaatatcttgataaaaattaccaatgatattagttaatccagttaaacgtctcaacatcgctatacaaacggcgtaacctgatgcactagatgtaaacattaaatatgtcattacaatcatttgcgttaaatatgtcacatctgattcaccgttatagtgttgtaaattactatttgttaaaaaagatattgctgtattaaacgctaaatctatcgattggtttaaattatgatttggatttaaaaaaagccattgctgaactattagcaatacaaatgttataaaccccataaatccattaaatgccagaaaatgtttgacatatgttttagctgacatgtgttctaaatctgtgccgataattttaaaacacatattttcaaatctagtaaatattaaatctactcttgacgattgcaccaatgctacgcgatatagatatccactaaaaacatacgtaatcataaccatcattgttagaaacaaaattatttccatgataaccctcacttaatatatttctaaaatttttcactacgaattaaggcataaaataaatacaaaactaatgcaataactaccagtaataaaacgatgagcattgccataacctccttacaacacaacaacatcgtaacaacttgtttatgagagaaatattaattttcaaacttagttattaagaaatcattaagatgtgtatgcagaaataaattttatagcatttaattgtgaagaatattatgatattgctatcgaggtgaaggttatgtcaaacactgaatcgctaaacataggaaaaaagcgtggatctttaacaatttacatcggttacagtccaggtgttggtaaaacatttgagatgctttcaaatgccattgaactatttcaaagtaacgttgatattaaaataggatatattgaaccgcatcagcgtgatgaaacaaatgcattagctgaacaattacctaaaatcacaaccaattttactaaacatggtagtcatcattttcaatatttagatgtcgaccgcataatcgaagaatcgccgacaatagtacttatcgatgagttagcacatacgaatatttctagagatcgtcatgagaaacgatatatggatattgaagaaattttaaatcatggtatcgatgttcataccactttgaacattcaacatattgaaagtttaagtagtcaaattgaactgatgaccggtgtacatgttaaagaacgtgtacccgactatttcataatgagcgccgatgtattagaagtcgtagatatctcacctgaacaattaattaaacgcttaaaagctggcaaggtatataaaaaggataggctagatgtagcatttagtaatttctttacgtatgcccacctaagcgaactgcgtacattgacgttaagaacagttgccgacttgatgagtgataaagaaaaagtccgacacaaccataaaacgtcactcaaacctcatattgctgtggcaattagtgggagcatttataatgaagcagtaattaaagaggcattccatattgctcaaaaagaacatgcgaagttcactgctatttatatagatgtattcgaaaaaaacaggcaatataaagatagtcaaaagcaagtgcatcaacatctcatgcttgcaaaatcattaggagcaaaagtaaaagtagtttatagccaaaccgttgcattaggattagacgaatggtgtaaaaatcaagatgtaaccaaattaattatcggacaacatattagaaataagtggcgagactttttcaatacacctttaattgaccatttaatgtcctttgaacatagctataaaatcgaaatcgttccaatcaaacaaatacctgttgaattgaaaatgaacaaatcaccctatcgtcctaaaggcaaacgtttcgccatagatatgttaaaaatgattttgattcaaataatttgtgtaatgatgggactgtggatttatcaacttgataagcatgagtctagtacgattattttaatgatttttctcatcggcatcattttattatccatttggacgcggtccttcatcattggctttttagcagcaattattaacgtatttgtttttaattatttttttacggaacctagatatacatttgaagtatatcgctttgactatcctattacatttatcgttagcattttaacaagtattttaacgagtgctttattaaaacaaattaaattccaatactccattactaaaaagcaactttatcgtacagatttattatttcaatttaatgattcgattaaacaaacttatacagttgaaaacttactaataaatgctggataccaaattaatcaattattgcaacaatcaattactatatacgttatcaatcaatcgaaagtaattaaaacaataccattgcaaaaccatatcgataatacgactcaacagcatgaacaagcattaagctgggtaattaaaaatgaaagacaagctggtgcaacaacagatacatttccaggcattaataaatggttgataccaattggcacatctccgattaaaggcattctagccattgattaccaaagttctcaagtgattaatccatatgatgcatcaatattagaatcaatgttaaatgaactttctctcgccgttgaaaatgtgacgttacttaaacaaacgagagaatccatgttacaggctgaacgtcaactgacacattcaaattttttaagatcaatttcgcatgacatacgtacaccgttaacaacaattatgggaaatttagatattttagtatcacatagtaaagatatgtctatcatagaaaaggaacaattacttgtacatagttttcaagaaagtcagtatttatatctattagtgacaaatattttatcattaacaaaattacagtcatcaaatgttcagataaaattgcaaccttatctcgttagtgaattagtagaagaaatcgatatgattttagaacgtcgccatttaaaaaagcgtataactgtatcatcctcagtaaatttacagtttatacacattgacagtaagttgattttacaagctttattcaatttgattgaaaatgcagttaaacacacttctactgacaccaaaatcaatttatctattcgttatgctagctatgaacaaatcgaatttgccgttatagacgaaggacctggaattagtttagaagaacaacaaaagatattcgagcctttttacacaggatcaaataaatattttaaagataaccaaaaagaaagcatgggactaggcttatatttagtacagactatcctacacaaacatcaatcaaacttacaatataaaccgaaccaaccacacggcagtatattctatttcaatatatatacagactttaacgaaggagacgtataatgcaatctaaaatattgataattgaagatgatcacgcaatcacacatttacttgatgttgcattaactttagattattacaatgtaactacagccgacaatgccacacaagcacactttaaaattcaaattgataaaccagatgtcattttattagatttaggtttaccagataaagatggattatgtttgatttcagaaatcaggcaacatactgacattcctatcattgtaataagtgcaagacaagaagaacaaacaattattcaagctttagataacggtgcgaatgactatatgactaaaccttttaatgttgatgagcttcgggcacgaatacgagtcatcgagagaatcgctaagtcacatcaagaaactaacattgtatttactaacggtttgctaagcatcgactttggctccaaatctgttgttattaataatcaggaggtacatttgacgccaaatgaatttagcttgttagaactattgtcaaatcataaaggaaaagtactcacttatgagatgatattaaaacgaatatatggctatgttaataagactgaaatgcctagtttaagagtgcatatgacatcattaagacaaaaactttcacaatgtcatgaggacgcaaaagatattattaaaacacatccacgcattggttatcaaatgttgcagtggaaagagaaataattaaataaaaaagatcgctgccattaaacgaatgattggcagtgatcttttttatattcaacttattatttatcgcgcactagcgtcagcaaaaagccctattgttttttataagaacatgatactgaaatttcataaagtttatttatgttcgattattcttaatttaaaaatagttctttaaattatatactcaccacatttggtggagaaccatatttacacagaatgatataaccgcatacagatctcaatccaattaaatatttaacctttaaaacgttagtactttgatatctacagagaatcaattattgaaaacaaaaaagagctcaagacattacatctttaagctcttaatctataaattatttttgatggtcagcaaatgtgcgacctttcataggtctgcttccaccgctgctcttctctttacggtcgaatttttttgtacttttcttcttacttgagtatccttttgaacgtttactcttactgtcaaatttaggattaccacgcttactatttctgttacgagaaccacttggtttaccgttacggcctttgcgagataatggtttttcaaaagttaattgaacttcaacttcatcgtttgcttctactaactcttgtaaaagtgcagcaactaaatcaacatcgttatattcatttaacaactctgtagaaatgcgtttcaagcgtgattctgactctttagacatccagttttcaactttttctttgatgtcatcttcacgtgcttgaagtacttctttacgatgtggtggacgaagtgcactcatttttctaccgtttgcatcttcaatttgtctgatataatccatttcgattggattaacaaacgttacagcgataccttctttaccagcacgacccgtacgaccaatacggtgtgtatagctttcagtatcttgaggtatatcaaagttataaacatgactcacaccagaaatatctagtcctcttgctgctacatcagtagcgactaaaatattaatttggtcatttttaaatttctttaatacttctaaacgtttcgcttgtgtaatatcaccatgtaaaccttcagctttatatcctttagaaatcaaagcacttgttaattcatcaacacgacgttttgtacgtccgaatacgattgctaattcaggttgatgaacatctaggaaatttgtaaatgtatcaaatttctctaattctttaacaattgtatagaattcttcgatttgtggatcagacatttcattattcattgtcttaatgatttttggtgatttcataaattgttgtactaaagcttggattgctttaggcattgtagctgagaacaacattgtttgacgttgtactgctggaattttatccataataaatctcatatcatcgatgaatcccatattcatcatttcatcagcttcatctaaaatcaaagtatgaattccgtccgtttttaatgtgcgacgatttaaatggtcgataacacgcccaggtgttccgactacgatttgtgggccttttttcaaggctttaatttggcgttcgataggcataccaccgaatacagtaacaacttggacaccttgtccacggctaaattctcttaattgttcagctacctgcattgccaattctcttgtaggtgctaaaatcaacgattgaaccccttgtttccctactactttctcaattaaaggaataccgaatgctcctgttttacctgtaccggtttgagcttgcccaaggatatcaattccttgtaacgcataagggatactgtctttttggataggtgtcggctctttaaatcccattgattcaagtgactgaaccgtattatccgaaatccctagttctttaaaattttgcaaaataattctcctttttacctgtttatttctcaatatacttttgcatataagttcattaatatttcatcaacttctatatagtaccaccaaaaaaatttaatcgcaataaagcaatttgcgaatatttattagaatcacattaattgattgtcatatttttgtcaaaaagctagcattagataagatgtaagcgttacgcatcattcgaataatcattataaaaaattttttataaaatacgtatatcgttaacattccacaacaaattttactgaaacacatgtgaaattagacattataatactacatctttttgtaaaacattatataaacattcaaactacttcctatataaagtgtgtacatagaattaaccttgatttagtttcaaatttatagatttaacataaaaagaaaaaggcaattttgtatttacacacaaaaccacctcttctttgtaatcttttagtattaattcaaatcatttttataagtaaaaggtccctcgactaatctctatgaaattaaagcatttaccacttcttctaatttcataccacgtgatcctttaactaatacacggtcatgcgcttttaaatcgtttattaaaacttctatcatatcgtctttagaattgaagtgttgtgctttttcgacatgttgctggcccgaatcataaatatacttcgcttcattaccaaacgtatacaacacatctatatgcttttcttctaaataattacctacaccgatatgcatttctttgctattttcacctaattctaaaacatctcctaaaattagaatgcgacgccctgtcaaagtactcagtgtatcaatagctgctctcatacttgtaggacttgcattataggcatcatttatcacagtaatatcattttctaatgtatgttgttccatacgcataccagttaagctgacattttttaaattttgatagattgtgttatatatcaaacctaattcatgaccaaccgcaatggcaatcgtcgcatttttcatattatgctttcctaatattggcagatcgtaatgttctttattattaatcgtaaatgaaatacctgtagtatctctatcatcaacagaacaaactaatgcattatcagtagcaacaccaatactaatacattttgcattttcaacttctttaacatgtggtttcaataatggttcatcgccatcatatataaacgtaccattatcttttagacctattgtaatttcagatttagctttagcaatcccctcgcgcgaacctaaatcttgcatatgtgactcaccaatattagttataactgcaatatctggttgagcgaggtttgacagaaattcaatttcatggaaacctgacatccccatctccaatattgatatttcagtatcattatctaattccaaaatagttaaaggtaaaccaatttcattattgtaattaccttgcgttttcttaactttaaattcggtatgcaatacactttcaatcatatctttagtcgttgttttaccattagaccctgtgacggcaattactttagggtttacatgtctcaagtaagcttgtgccaattgttgtaatgccgttaatgtgtcttcaacccatataataggcccgcttacattttcatctataggtgtccctctttgataaaaagcagccccagcaccatcttgtaatgctttagagacaaagcgatgaccgtcaacattttcacctttaaatggtataaataacatatttttagaaattgctcgtgaatcaattgtgactccatttatctcttgatttaaaaattgatcttcaatttcacaaggaatccatgattgaatttgctttaatgtaacattaatcataataacaacctcagttagtcaattttgtatttatttttctgtttatcctggtgacgttctttagcaagctcgataagttttgtaatcaattctggataagataagcccatattttcccataactttggatacatactgaaagccgtaaatccaggcattgcatttgtttcattaatatatatttggttgtcttctgttacaaagaaatcagcacggactaaaccagaacaatctgtcgctttgaatgcctctaatgccatatttctaagcgttaattgaacatcttcgtctaagtcagctggaatttgtaattgaaccttaccatctttatattttgatttgtaatcgtaaaacgcgacatcttttacgacttcacctggccatgtcgcttcaggatagtcatttcctaaaactgctacttcaatttcacgtgcgttaacgccttgttctataacaagcttacggtcaaattggaatgcttctttaataccttctttaagttccgcttcattattacatttactgatacctacacttgaccctaagttagcaggtttaacaaagactgggtaatttaatttatcatttactaattttaaaatgttatgttcatatttttcatattcagaacgtaagaaactaatataaggtaactgtggtaaccctcgatgttcaaataattgtttcattacaagtttgtccatagaacttgcagctgacaatacaccatttcctacatatggtacatccaaaacttcaaaaagcccttgaatcgtgccatcttcaccattaggaccatgtaataatgggaatactgcatcgtatggttgtcctgaactactttctttcaatagctgtgaaatctcaagcgcctctccattttctaaatgaagctcatcagtagatttaatttcagctgtaatattattttgctttctccaatcaccatcattggtaatataaatgatatcaacatgatatttgtctttatctattgcatttaatacattttgtgctgtcagaatcgatacttcgtgttctgcacttttccctccaaaaacgatacaaatattttcttttgtcatttcgttttcctccaatgatatatcagggtttgctaccttaatataaattaatattgatttagtcctattgttaattgatttattcgcatctttgaatcttaatagtatcacattttaatgctattttgcattttaaaaacgaggacttatgtgtctgtatctatgttgattcatttataatcagaacaatattcccttctattttattcctaattcaaattgaaatctatagctgatatcactgtgatattctagctaatttttaaaaagtcatgtaaaattgatataaacattagtgagtataaaaggagtttgcaatgaattattcatctcgtcaacagccggataagcattggcttcgcaaagtagactgggtattagtagccactatagctgttttagcaattttcagtgttctgcttattaactcggcaatgggcggtggtcaatacagtgctaatttcggtatcagacaaattttttattacattttaggtgcaatttttgcaggtatcatcatgtttatttcacctaaaaagattaaacattatacatatttattgtatttcttaatctgtctattattaataggcttgctcgttattcctgagtcacctattacacctattatcaatggtgccaaaagttggtacacgtttggccctatcagtattcagccatctgaattcatgaaaattattttaattttagcattagcgcgtgtcgtttctagacataatcaattcacattcaataaatcattccaaagtgatttgttattatttttcaaaattattggtgtctcgttagtaccaagtattttaatattactgcaaaatgacctaggaactacattagtattagctgctattattgcaggtgtgatgttagtaagtggtataacatggcgtatcttagcacctatctttattacaggtattgttggtgcaatgacagtcattttaggtattctatatgcacccgcattaattgaaaatttattaggtgtccaactgtatcaaatgggacgaatcaattcatggcttgacccctatacatatagtagtggtgatggctatcatttaactgaatcacttaaagctatcggttctggacagttactaggtaaaggatacaatcacggtgaagtttatatacctgaaaatcatactgactttatcttttcagtgattggagaggaacttggctttatcggttctgtcatattgatcttaatatttttatttttaatcttccatctaataagattagctgcgaaaattgaagatcaatttaacaaaatctttatcgttggtttcgtcactttacttgtgttccatattttacaaaatattggtatgacaattcagttgttaccaatcactggtattccattaccatttattagttatggtggtagtgcgctatggagtatgatgactggaataggtatagtcttatcaatttattatcatgaaccaaaacgatatgtcgatttataccatccaaaaagtaattaatttaaactattttgagtttcaaatatcataacttttcaagatgacgttatatagtctatttacgtcgtcgatttaaaatgtcatatatagatattactcgataataacaatccctctttgaagtacacattgtaaaatgtacactctaaagagggattttgttatatagtacttgctttcattttagtaaatccagtcaaaaaagctatcatcgaatagtccgacgatagctttaacggtgtgtgattcacaatcacagtcaattattttaattcgtgacttactttattagatgctggcaaagtattaataatgtctaaacgagatttagtttttttaatattcacacctaatgatgacaatagtttgactacattttgaatcttttcaggacgtttcattattatcacctcgtttggatcgctttcaatattatcttaccctattcgacatacctttactacatcatttacaaaatttttaatttattttcaaaattaaaatctatagcgcactctacattataccctaaaatacaattttgtatccttcatcatagatttctttttcaatactattcaaatttgctggtgtctcatacgatacagttacttgaccatctattatattaatattcacttgatgaacacctatcatatttgaaatgcgttctgtcaattgacttacttgttcttctgtttcaattcccgctgtgtaaatcgtattttgatgtatcatcttaaactcctttagtctttaatcaatttttgaaaagtcactaataactcttccattgcctcttcctgagcaccttgattaactttattcataatacaacttttcatatgttgttctaataactttatcgcaacactgtttaacgccgaacgtgtcgctcttatttgcgtaaggacatcatcacaatagacatcttcttcaatcatgcgattaatcgctctcacttgtccttcaattcgatttaaacgtgatttaagattcgtttttatttgttcagaatgatgtgcattatcttgttcagtcatagcattcactccttcatttacattccttactatactatattccataaaacacaacgtcaacacaaagtgtgtttttcaaactaaattgtcatgatatttaaattgcttcatgatacaattaataagatatactactcgtttaagattttcgatgggaggtttcaaatgatagagttattatccattgcactcaagcattctaatattattttaaattcaatatttattggtgcatttattttaaacttattattcgcctttaccattattttcatggaaagacgttctgccaattctatctgggcttggttactagtcttagttttcttgcctttattcggcttcattttatacttactattaggacgacaaattcaacgtgaccaaattttcaaaattgataaggaagataaaaaaggattagagttaatcgttgatgagcaattagctgctttaaaaaatgaaaacttttcaaattccaattatcaaattgtaaaatttaaagaaatgattcaaatgttgttatataataacgcagcatttttaacaacagacaacgatttaaaaatatacacagacggccaagaaaaatttgatgacctaatacaagacatccgtaatgctactgattatattcattttcagtactatattattcaaaatgatgaattaggtcgtaccattttaaatgaacttggtaaaaaagcggaacaaggtgtagaagttaaaattctttatgatgacatgggttctcgtggactgcgtaaaaaaggcttacgcccgtttcgcaataaaggtggacatgctgaagcatttttcccatcaaaattacctttaattaacttgcgtatgaacaatcgaaaccatcgaaaaattgttgtaatagatgggcaaattggatatgttggtggttttaatgttggtgatgagtacttaggtaaatcaaaaaaattcggctattggcgagatacgcatttacgaattgtcggggatgcagtgaatgcattgcaattacgatttattctagattggaattcacaagccacacgtgaccacatctcctatgatgatcgttatttcccagatgtaaattctggtggaacaattggcgttcaaatagcttctagtggtcctgacgaagaatgggaacagattaaatacggctatttgaaaatgatttcatctgctaaaaaatcgatttatattcaatctccctatttcatacctgatcaagcctttttagattctattaaaattgcggcattaggtggtgttgatgtcaatatcatgattcctaataaacctgaccatccgtttgttttttgggctactttaaaaaatgcagcatccttattagatgccggtgttaaagtatttcactacgacaatggctttttacactcaaaaacacttgttatagatgatgaaattgcaagtgtgggaacagctaatatggaccatcgcagtttcacattgaatttcgaagtcaacgcttttatttatgaccaacaaattgccaaaaaattaaaacaagcttttatagatgatttagcagtatcttctgaattaacaaaagcacgttatgctaagcgaagtctttggattaaatttaaagaaggtatttcacaattattgtcacctatcttataaaatagaaatatgaggagtgtaactttaatgcaacaatcagacgtcattagtgctgccaaaaaatatatggaatctattcatcaaaatgattatacaggccatgatattgcgcatgtatatcgtgtcactgctttagctaaatcaatcgctgaaaatgaaggtgttaatgatactttagtcattgaactcgcatgtttgcttcatgataccgttgacgaaaaagttgtagatgctaacaaacaatatgttgaattgaagtcatttttatcttctttatcactatcaaccgaagatcaagagcacattttatttattattaataatatgagctatcgcaatggcaaaaatgatcatgtcactttatctttagaaggtcaaattgtcagggatgcagatcgtcttgatgctataggcgctataggtgttgcacgaacatttcaatttgcaggacactttggtgaacctatgtggacagaacatatgtcactagataagattaatgatgatttagttgaacagttgccaccatctgcaattaaacatttctttgaaaaattacttaagttagaatctttaatgcatacagatacggcgaagatgattgctaaagaacgtcacgactttatgatgatgtacttgaaacagttttttacggaatggaattgtcacgactagacattgaagttgtagtatgatgatgcgatgtaatggcgtgttgttgtggaagcttggtgtcatgccatgttactttgatgtgttgttgtgggagcttggtgacatgtcatgctactttgatgtgctggtaccacgatgcgtcttgatgtagtgctatgatgtggcattgcggtgttatggtgttatagacaggtttggcgttgatgccatgttactttgatgtgctggtaccacgatgcgacttgatgtagtgctatgatgtggcattgcggtgttatggtgttatagaccggtttgatgttgatgccatgttactttgatgtgctggtgctacgatgcgacttgatgtagtgctatgatgtggcgttgcgctgttatggtgttatagccaggtttggtgttgatgtcatgccgttacgattctatgatatgttgttgggacgttgcaatgtgtattatgccgttgtgacgttattatttcacactgttacatgtataagtgaattgctgtggaaatttgcgacatatactgctacactgatgaatcattgtgtcaagatgacattgcgatgaagaatgacaactctgttattaaccactttttacatactgaaaactcgttaatattatttcaaataaaaacagcagtaggatgactttcacatttgaaatcatcttactgctgtttctatttatcacatattgtataatgtgacactaagtttcgctattgaagcgaaaaataatgtgcgccctataaagttaaaattatcttcaacttttagggtgcacattatttggacttgctaaggttatttctttttctttttagacacaacttgtgtgtttttgccttttttattgctgccgccgttgtgctctctttcatacgcttcaatgaaaggttgtacttcttttttagcgactttttcataataaatgttcgcaaagtgtgtttgaactacaaggaacgccgcactgactgaccagtacaaaccaagtgctgatgctgagcttaatgaaatccagataatcataattggtgaaatgaccatcatcatgtaacccatttgacgttgttcgtctggcatcgttttacttgatacatatgcttggataaagtataaaacaccggcaataattgtaatccaaatatcaggacgtcctaaatcgaaccataagaagtgtggatatttaaacaaaccatctacaagttggtctttaagtacaaagtataatcccatgatgattggtaattggattagcattggtaaacaacccaacatactcttaatcgggttcatgtcatactttttatatacttgcattaattcttggtttgcagccattttttcttcttgtgtacgcgcacgtttcactttttcttgaattttttcaacttctggctttgcaactttcattttttgacgcatcatatgactatttttatagtttgacaacatgaatggtaataaaataatacgaattaccaatacaaggataataatagctaaaccataattgtcgtttaataagttatttcccaaccaatccaatacatttttcattggatctacgaatgtattgtagaaaaacccactacgtttttcaggtttagaatagtcacaaccagccaaaaagaccataatacctaaaaataatggtagtaacgcttttttcttcatttttccacctctatcattatattcacataggatttattctatcacattaatgagtacgtatgaaacaataagtggaaaaatttaactaattattaaaaaaatctttgaatcgattaacagtcttttcaatattttcacttttagaaatggctgaaatgactgaaattccattggcacctgcttctacaatcggcgccacattattagtattgataccgccaatagctacaatcggtagttgcggattcatttctttaaacgttgcaatcatttctggacctactggtatatgcgcgtcatgcttcgacggcgtaggatagattggtccaacacctatataatcaacatgagttaaatcagattttgcatactcatctaaatcactaatactaagtccaataattttatcagtgaaatattgtgctatctctttgactttcgcatcatcttgaccgacatgtataccatccgcgttaatttcttttgccaaggatacatcatcattaacgataaaaggcacatcatattgatgacagagatgctgtaattctttagctaatacaagtttatcgtttccttttaaagctgattcacccttttctcgaaattggaaaagtgtaatccctgcctttaatgctgcttctaatacttcatgaatagttcgatgactcggaacatcggaggtcccacaaataaaatacacatttagatacgattggttaaacatattattccacctcttgaatacgaatccgttgttgataggttgtttcatttaaatgatataacgtatcaagcaacaatggtgaaaacgtaccaggaccaccacaattttcattttcagcagctacctcagcagcaatattaaatacgcttaccgcttcaattaacgcttctatgtctggttctgtttctctaaataaaaatccagcaataacgcctcctaataaacaaccagctccagttactcgtgctaataatggagatccattagctaatacgaaggctttattatcttgaacaataacgtcctctttacctgtgattactattgcagttttatatgttgcgtaagcctttttcgctattgcaaccgcatcaagattagcatcactatctgtacctttcatagttgctgtatcatcaatcaacgctaatatttcagatgcattgcctttaattactgatactttcgctgatttcaataataatttacaaaattgctttcgatatgtagaagcaccaacagctacagggtcaaatacaataggtaagcctgcctcatttgccgtttgagcaatcgcaataatatcttgttcattttctgctgttaaagtaccgatattgattaatagcgcttgtgcaactttgtaaaattcttcagcttcttcgggagcttcactcattgcagggctagcaccaatacttaataaaccattcgctgtaaaatttttaactacatcgtttgtataacaaattgttaatgggttttcaatacgtattttatttagataattcatcgtctaatccctctttctttaaatatgcaaaatgattcactggacctctaccacggccgatttcaggcgtatattgtatactcattgaaataaactttttagccttgtgtacagcctcaaataatggtctaccttttgcaagttctgccgttataactgctgaaaatgtacaccctgttccatgcgtatgttttgttttaaatcgttcattttcaaatgtttgaacaccttcgttagtaaataaataatcttttgctatatcagtatcatttgaatgaccgcctttaatgatgacacctttactaccaatctcattaataaagatgcggccagcctgcataattttttcttcactatcaatggttagtcccgttatttcttcagcttctggtaaattcggtgttactacgtcagctaatggcaataacgtatgctgcaagttttgctttgtgtcattatccattaatgaatcaccgcttttcgccaacataacaggatcaattacatatggaatagattcatgttgcattaaataatgacgaatcgtttccatagtatctgctgtagcaatcatccccgttttaatagcatgaggtaaggtatcattgaagacactatcaagttgttcatctacccattgatgatttaaattatgaatatgttgtacgcccaatgtattttgagcaacaatacttgtaacgacgcccataccatatacaccacatgaatgaaatgattttaaatcagccattacgccggcaccacctgttggatcagtacctgcaatggttaatgctattttaggtttaatcatttacttttcctccaaattcccattgttctagtgtcatagccatattgaaaaatcgacgctcatgtatgcaactttctaaaaatacttgctttacttgttccaattccttgtcagacattgattcggctaatttattcattaatgcctcaaatacgttaattatgtcatccatttcagtactataaaaatcaaaccattttgccgtatctttttctctattaagcttatgatcactttgagagcgcttagctaattctgcataaatatatggacaaggtgccattgcagcaattgtataaatagcattttcacgactatgcgcttggaaatacatatgttttatgtaatggtcgccacttggaggccaaacttttgttttaatgatttcttcgtatgattcaccaacaatttgcgctaaaatatcatgcgcaagtacttcaccttcaaccataaattctatttgctctactaaaaattttacgtcattcatgctattcatttttggaattaacaaagcatataagtttgtaaattcttttaaatacgcagcatcagcttttaagtaatggcgtaatgcgtcagctcctatatctccggataacatcttctgaataaagtcatcctcataaatatcattaatgattggctttgcagcttggtacaatttttgtgaaaattccattgtaaaaaatcctccctaaataaaaaaactacttccaacatgaaagtagtttgatggcaatgttgctatactagccccatcacttcaataactactttcctacgttggtactaaccaaatcaggtcataagggtctgaacaattcatctcagccatatcattaggctcccctagtagttccttagtattcaattgcaaattaatcttagcaaacggtttcaacattttcaattattgttgctcagttgtattattatctttaaataataattctataatgacatatatttgcgaaataaaaaaaccggaacatatcgagaattccccgatatattccaatctaaaagttacttatataactattaattagctatgcataaatggcttatgcagtaacccaatgtccagcgccaccagtgttatataattttactgctgcggcatcttgaacactttcaggagcatttgctggtgatacacctttatatttagcaggtgctactgaatcccaagttgattgtaagaattgatacttaccagctgcacctgatgttggatttacagcatgaatattgccacctgattcacgttgagcaatttgttttagatgagcattcacatttactgatgaaccttctgatgattttgattcagttggtgttgcagtaacttgtgaattgtttgatgttgatgcttgtggttgttgagtttgagcattttgtggtgcttcaacttcttgtgattgtacttgattagcttgaacagctgatggtgcaacattattagttgcaggtgcttgtgcactcatgtctgctccattagtacctgttgcatggtaattccaagcaaagtgtgtaccatctgattcaaagtgataagtaaacccttcatagtcaaatgtataattataagccccagcttcaattggtttttgatttaatgtttgatcatttgattgcgccatttgcgctaaagatgctttatttaagtccgcttcacttgcatgggcttcgtgacctgcatttcctgctacgattcctaaacctactgctaatgatgatgcgagtaatgttttcttcataatcttaaaatcctcctacaagtaatttgtttctctaaaagttttacagagactactgtaacatctataaaatccgtgcaggttacaacaaaataaaaaaatagccttgttttttacacagtgattacaacgaaatcccccataatttcagatatgattctatcgagaattgtcatgacagtaaaaatgttttttatttgcaattttttatgtaatcgttttgcaatctatgtctattttctattagaaaaactacacaaaaagacgacctacacaacagtactagtcatgtaagtcgtttttaagtgagtatatttcaagttaattagatctataaaaaatttaggatggattaaatgtatattaaggatgtttaggataattggatttaaatttctaataagtcatgattatctatattttgagagtcaatatctaaaatactatctgagagaatttcattattttgggatttaggggacataaattttattgtttcaacatataattcagtgacaaagtgtgtttgtccgtctttatcatactttcttgatctcatttgaccagttataccaaccaatgtaccttgattagtatatttttctatattagaagctaacttgccaaatgctttacagaataagtaatcacagacgatttctccattttcatctttataatttcggtgcgttgcaacacaaaacgttgcaatttttctatcctccttttcaaatatttgtgcgtctttcgtcagtctcccgacaattacgattttatttagcatgtagtgtgtgattcacctcctatgcctatatcttaattactagcttaaaaatggtcaaaatggcaaattttatataattaatagctatagcatctcgttatttgttatatttaaagaaattagtcatgaaatgaccttaaatcttctaaataattcaaaaatcataaatattaaactaatgggatgtgggaatatgaaaacttttaaagcagtaaggtttcaaattgtgaatgaacacggcagaattatagaatatgaattagaagatggcgtaataattaataaagaggaaagtggcacgggttggttgcttgaaattgtcatttctaatgagcattatgaaacatttaaggaatatcaagacaatgaacagttattggatattcgtgtcgtcatcacgcgtccagccaatgatccagctttatttgaatctactgtgaaaagtattaaaaattttaaaacaacaatgtctatcgtatttgaatgtcatatttacactttacgtcaacagtatgctgaaagtttattagaacaacttattgatgatggattatctggtgaagaattaaaaaaatcatttaatcgaatgatgcagtctaaaccaaagttaaaggatgaaaaattagaagagtaaaataaaaaacattcaaagattatgccaacacattaaatctttgaatgttttttttgttttattttacatcttgaattgcaaatgtaagttcacaactacaagcaagttgaccatcgacagtagctttagcattacctttacctattggtcctttaattttagtgatttctacttccaacgttaaagtatcaccaggtactacttgacgtttaaaacgacatttatcaataccagcaaataaagcgattttacctttattttcttcactatttaaaatagctaccgcacctgtttgagctaacgcttcagtaattaatacgcctggcattaccgcatactcaggaaaatgcccttgaaagaatggttcgtttcctgatacttgtttaatagccacacaacgttgaccttcttcatattcaactactttatcaattaataaaaatggctgtctgtgaggtataatttgtttaatttggttataatcaaaaattgtttccatggttgaaatcctccattatattaatttactgaattaatcgttaatacgttcaatgtctgcacctaattgcttcaatttaccgtgtaagtcaacatagcctctatctaggtgcgttaattcagtaacgcttgttttaccatcagcaactaatccagctaaaattaaggcggctgctgctcttaaatcagtcgctttaacttgtgcaccttgcaattgacttttaccttcaagtttagcactacgaccttctacattgatattagcattcatacgtttgaactctgcaacatgcataaaacggttttcaaaaacagtttcggttacgactttatgaccatttgccgttaataacaatgccatcatttgtgattgcatatcagtcgggaatccaggatgtggtagagttttgatgtctacaggttgtaattccccttcagcacgtacacgaataccatcttcttgatagtccaattcaacgcccatttcttctagtttatagactaaactcgccatatgttctttgattgcatcacgtacaaaaatatcaccacgcgttatagcaccagcgattagtaatgtgcctgcttcaattctatctggaatgatagcatgttctacaccatgtaatgattctacaccattgattgtaattgtgtctgtaccagcaccagtaattctaccacccatttcattaatgtagtttgctaaatcgacaatttcaggttctttagctgcattttcaattaaagtcttacccttagctaatgatgctgccataataatattttgtgttgctcctacacttggaaaatctaaatgaattgatgtaccttttaatccatctttagcattagcataaatattaccattttcaagatgaatttctgcgcctaaagcttcaaaacctttaatgtgttgctcaatcggtctacttccaattgcacaaccaccaggcaatgcaacaatagcatgtcctagtcttgctaaaagaggtcccataactaaaatacttgcacgcattttactaacatattcatatggtgcctcttcatttagagtctttgttgcatcaacgacaacagcattttcgtcctttttgtatgtaacgtcagcatttaaagttgttaatacattatttattgtttctacatcacttaaagctggaacattaactaatttgctcggtttatcagaagctaataaagatgctgtcaatattggtaatactgcatttttagcaccttctactttaacttcacccgttaatttatttccacctttgattactattttatccatcgtaaatcctccacttagaactcctattactttacatttccctattttaaaattattttaagtcattatttaattatatctagttttgattacaaatcatagagttagacttattttattaaatattttacctgcgtcgagtattgtaacaaatctacaataaaattgcttactgcagtgcctaataaaatagcaacaaatatcatacacacttgtaattgagtggcgtatccttttttaaaaaattgatctaatctaattgattgtaaagcccaataggcaatacaaatacatacaacatgtaacactaaatggataactgcatattgtccgatataatccattttatcacctcataagattactgtattacattgtacatgaaaaatttaaataatgatacaaagtttaatacccgtttttagtaaagtttaagctaacttactatataattctttttacataaatatcataactataaaatatcttggtatgaaaaaatgtagataatttcaaaaaatgaaatgtcgactgtagatagtggtgaaggaaattttgattttagcaatctattagtgattgtaaaaaagtaaaactattcttgggagtcggacataaatcaatgtctagactctatagtgttgtatttggcagtagttgacggggccccaacataaagaaatactttttctttagaaattagtatttcttatacatgagttttactcatgtattcctatttttaaatacacattagctgtgtttaatgataaagaaccactacatcataaatctttaatggttctttatcaattccttcccccctctcatgttttgtatctttaaatcaatataattcaaaaaagggtcgaagatatgaaatcacatcttcgaccctttatttactattttaattcagccacacgcaaacggttatttgctctctctaaagctctttcggctctatgaatatcagtattgtcgtcatcattttccaagtgagactctgctcttgctttggctaatttagctctttcaacatcaatttctcttgcagtttctgcagtctgaacaatgattgaaactttatcttttctaacttcaacaaagccatcgcttacagcaatatattcagttccatcgtgaaatttcacttttacaaagcctgtttttaaagcagctacagttggaatatgtccactcatgacacctatctcaccagctgttgtttgcataacaacgagttcaacattatcacgattgtaaacagaaccattaggagtgacaatatctaggtttaatgtattcattatccattcctcctaattgttatacttcaacacccatatctttagcttttgcaataacatcatccatgctaccaactaaacggaatgcatcttctggaatatggtcatatttaccatctaagatatctttaaagtttgcaactgttgtcttaacaggtacataagaacctttttgaccagtaaattgttccgctacgtggaagttttgagataagaagaattgaattctacgtgcgcgttcaactgtttgtttatcttcatcagataattcgtccatacctaagatagcaatgatatcttgtaattcacggtatttttgaagtgttgattgtacatcacgagctacttcataatgttcttgacctacaattgatggttccaatgctcttgatgtagacgctaatggatccacggctggataaatacccatttcagttaatttacgttctaagtttgtagttgcatctaaatgggcaaacgctgtcgcaggcgctgggtcagtatagtcatcggcaggtacgaataccgcttgaatagaagtaactgatccttttgttgtagacgtaatacgttcttgtaattgtcccatttcagtagcaagtgttggttggtaacctactgcagaaggcatacgacctaataatgcagatacctcagaaccagcttgtgtaaatctgaaaatgttatcgatgaataataatacgtcttgaccttgttcgtcacggaaatattcagccattgttaaaccagataatgcaacacgcatacgtgcaccaggtggctcattcatttgcccgaataccatggctgttttcttaattacaccactgtcactcatttcgaagtataaatcgttaccttcacgagtacgttcacctacaccggcgaatacagaaataccaccgtgctcttgagcgatgttgttaattaattcttggattaatactgttttacctacaccggcaccaccgaacaatccgattttaccacctttaatataaggtgctagtaaatctactactttaatacctgtttctaaaatttgaacttctgttgaaagttcatcgaatgctggtgcttgacgatggataggatcgcggcgaacagaatcactaatttcttctttaaggtcaattgtttcacctagtacattaaatacacgacctaatgtttcgtcaccaacaggtacactaatttctttgcctgtatcttttacatccatgcctctttggacaccatcagttgaatccatcgcaattgtacgaacaacgtcgtcacctaattgcagcgcaacttctaatgttagttgtattgtaccttcttctttaggcacatcaataaccaaggcgttattaattttaggaacttcgttatgttcaaatcgaacatcaattacaggacccataacttgagttacacggccaattcccatgctattttcctcctttaaatattattcaagcgctgcggaaccaccaacaatttcagtaatttgttgcgtaatttctgcttgtctcgctctgttatattctaatgataagtcatcaataagttcagttgcattatcagtggcatttttcatcgcagtcatacgtgttgcatgctcacttgcttttgcgtctaatattgttccgtaaatcaaactctcaacatattgaggcaagattacacttaagatagattctttatctggctcaaattcataagaagacaaatgaccatgccccttactagaatcctcttgagataatggtaatacttgtctagatgtaggcttgttttcaagaacgctgacataatgactatagtatatatttaattcatcaatttcttcttcactgtataagtctatagcatggttagctagtgcttgaacagatttgaaagaaggttgatcaggtacgtctacttgagaatactcaatgtcataacctctattttttaggaaatcaacaccttgttgccctaaaactacaatactgtattcgctactatcttgatgtttcgcttcaatatcagtaatcaattttttaagcacgtttgcactatatgcacctgctaaacctttatcactcgtgataactaaatatccacttctagtaattttacgaggtcttagcattggatggtttgtattgctacttgcccctgcaactgcagtaattgcatcttgcattttatccatatatggtgtgaattgttttgtatttttttcagctctacgaagttttgaacttgataccatgttcatcgctttcgtaatctgcttcatttttttggttgattttattcgagtatctatttctttaagagaagccactatctcaccaccttatactaaacttgtttattattcagatttgctaaagctttttttgaattcgttaattgctgtgtcaaacttctcagcatctggtaagccaccagtttctctgatttcatttaacagttcagtagcatttgattctgcccagtggtttaactcgtcttcaaaacgtgtgatatctacaactggaatatcatctaaatatccttttgttaatgcataaataatcaacacttggtgttcgactggtaatggtttgttttgatcttgttttaagacttcaacagtacgtttaccacgttctaatttacttgcagtaaattcatcaaggtctgaaccgaattgtgcaaatgattcaagttctctgtatgacgctaagtcaagacgtaacgtaccagcaactttcttcattgctttaatttgtgcagatccaccaacacgagatacagattgtccggcattaatcgctggtcttacacctgagaagaataaatcagattgtaagaagatttgtccatctgtaattgaaataacgtttgttggtacataagctgaaatatcaccagcttgtgtttcgataattggtaatgcagtaattgaaccgccacctaagtcatcgtttaattttgctgctctttctaataatctactatgtaagtagaatacgtcacctgggtatgcttcacgacctggaggtctacgtaataataatgataactcacgataagctgctgcttgtttagttaaatcatcataaacgattaaaacatgtttaccgttaaacatgaattcttcacccattgttacacctgaatatggtgcaatatataataatggagaaggttcagaagctgatgctgctacaacaatagtgtagtctaaagcgcctgcttgtcttaacttttcaacatttgctcttactgttgaatctttttgaccaatagcaacatagatacaaatcgtaccttgatctttttggttcaaaattgtgtcaattgcaattgttgttttacctgtttgacggtcaccgatgattaactcacgttgacctctaccaattggtactaaagcatcaattgctttgatacctgtttgtaatggctcatctactgatttacgatccattacaccagtagcttttttctctactggacgtgttttagttgtgttaatcggtccttgtccatcaataggttgtcctaatggattaacaactcttccgattagttcttcacctactggtacttccatgatacgaccagtacgtttaacttcgtcaccttcagtaatacctgtgtatggtcctaaaataaccacacccacgtttgactcttcaaggttttgggctaaaccaagtacgccgttatggaattctactagctcaccagccataacgtcatttaatccgtgaattaatgcaataccatcaccaatttgtaatacagtacctacatcagttacggacatttctgactcataattttcaatttgtgagcgaagtaatgcactgatttcttcagcttttatggccatctatgtcactcctctttataattaattaactcttctaaattttctttgtaattggacaagatcatttctaacactaccatctaatacagttgtgccgactttaactctaaatccaccaattaaatctggattaatttttgtatctacaataactttagataacttcgtttgttgagttactagtttgacaatcttatctaactcttcttgactcaattcatatgttgactcaattgttgcaaaatcttgattgtagtgtccgttatataagctttggaacgccttgaatacgtcagctattaatgagatatgtctattatctgctaacacgtacatcatatttttaatgtatggattaatgtcagtaaatacaccattaatcaactcacgacgttgttctgctgtttgagttggattactgtcaaccattctcaattgctcaattttatcttttactgcttcatttataactgttaattcttcattaatagtctctaaattatttgtatctaatgacacgtcaaataatgctttagcatacttgttagctacttttaccattatttatcgcctgcctcttttagatacttgtcaaccaatgctttttggtcttgttcagaaatttcttttctaagaactttagaagcaattaacactgatagttcagatacttgattattaatatctgcaatggcacgttctttttggctattgatttcactttgtgctgtttcaatcataccgtttgcacgtacgtttgcttcatgaataatttgttcttgctgttgacgtgcttgaaccttagcatcttctaaaatcttttgaacttcttcttgtgtttctttaagtttttgtttattttcttcttcaagtttctgtgcatttaacttagcttgttctgcgtcatcgatatctctgttaatatctctttcacgtttatccattacatctttcaatggaccccatgcgaactttttaagtaacgcaagtaacacgatgaaagttaggacctgtacaatcacagtaccccactcaacgcctccagctgcaccaagaacgaataagttagctgtttcagtcacgggttcatgacactcctttcattaaaataatcgctagtgttatatagaaaaaaacgacgaggttaggacctactgaatttatgcgataggcatggtgcgttcatatctcaactatttaataaagttcaaagatattactatatatgcatcatgaattatgtcctatgcgctttgtcccgacctcttttatctgttaattatccagcaaatgtcatgaatgcaattactacaccgatgataggtaatgcctcaactaaacctacaccaatgaacatgatacccattaattgaccacgtgcttctggttgacgtgctacaccttcaactgttcttgaaacgattaaaccgttaccgatacccgctcctaatgctgataaaccaattgcgattgctgctgcgattaaattcataatttaatttcctcctgtgattgtatataattattgaaatttttagtgttcatctgccactttatgtgacatataaaccatcgaaagcataataaagatatatgcttggattgttcctacaaatattgaaaatgcttgccaaacaattaatcctgggatactaataatccaaccccatgctggttcgttaaagaataagccagcaagtaatgttaatagtatctcacctgcaaatatgttaccgtacaaacgcagaccaagcgttaatgttgaagtgaactcttcaaaaacattaataattgccaatggccaaaacggctgtacataacctttaagatattgtttcgtaccacgcattttaattccataaaagtgagttaacagtattatcgttgtagacaacgttaaagtcactgttgcatcagctgtcggtgatttccaccacaatgtgtgatctttcgttactatagaaaacggaagacctaacatattagctataaaaatgtacagaatcagcgttactgctaagaagtggaattgaccaccttttttccaagccatgttaccttcaatgattcccctcacgaaatcaaaaatccattcaacgaaattttgtttgccagttggtctttttttcaaattacgcgtacaaatgatagcaagtagaaaaacaagaaacgccgtaacaagtatcatcaatatacttgataaattgaaaacgatatcaaaaccgaataaattccaactcacgagcggggatttgtgatccataatctcacctctttcttaatttatttgctcacctttagtaaaggacgtatgataactacaacatatgaaatcattaaaccaataattataccgatgatacttacatgcgctttattaaggtaccaaatcatacaggcaataattgcaactaagtatcgccacatatttccagttgaaatatgcatagtgtctggtcttttagctttagctaaatagcattcaaaaatacatgtgttgattgcagaaccagtaacaccaatgattaatcctaagataaatgcatggtgtgtataaaggtataatcctcccaatattattattagataaaaataatattgaatgaactgtttaaaaatgttgtagaaacgactcattttatatgcctccgtgtgactgatatcaatcatgaaaaccgttccactcatacaaactaaatgataatataggcgatttgtggtgtcaattctattcaaattgttgtaaaaaaataagcatagttagacacaatttagacacaattagacaaaaagtctattttcctcagaaatcgcttggtttttcagtgattaaattcaaataatacttaatatgattaactattctttctgaagcaaatccatcaccgtaaggattagatgcttcagacatttgatgatataatctctcatcatcgattaattcttttgcagcttgatacacattttgcttatttgttccaatgacttttaatgtgccagcttcaacaccttcaggacgttctgtaacacttcgcaaaactaaaactggcttattaaatgatggcgcttcttcctgaattccacctgaatctgtcaaaataaaataagattttttagcaaaattatggaaatctactacgtccaaaggttcaatcaattcaattctgtcatgactacctaaaatcttttgagccacctctcgaactttcgggtttttatgcattggatataccagtgctaaatcagtatactcatctattaagcgtctaaccgctttaaatatattttccatgggtttcccgatattttctcgtcggtgtgctgtcataagaatgaattttttgtcatggtatttatccatgatgttagatttataattgtcatcaactgtatatttcatagcatcaatcgcagtattaccagtgacaacaacactttctgaatatttcccttcacttaacaaatgcgatgcagcatttttagtaggtgcaaaatgtaagtcagctaatacaccaactaattgtctattcacctcttctggaaaaggtgaatatttatcataacttctaagccctgcttcaacgtgtccaatcggcacttggttataaaatgccgctaaaccacctgcaaatgtcgtcatcgtatcaccatgtacaagtaccatgtctggtttttctaattgaatcacttgttctaattgagtgattgatttagaagttatctcagaaagtgtctgtcctgatttcataatattcaaatcgtattttggtttgatttcaaaggtacttaatactgaatcaagcatttctctatgctgtgctgtaacaacaacaattggctcgagcattttttcttgttccaaagctttaactaaaggagccatctttatggcttcgggtcttgttccaaatatggtcataatctttttcatcaaactacttatctccgattcttctatttagtaccaaacaatctatctccagcgtcgcctaaccctggtgtgatatatgctttgtcatttagcttttcatcaagtgcagcaatataaatatctacatctggatgtgcttcatgcatcttttctacgccttctggtgctgcaattaaacacatgaagcgaatatttttagcgccacgtttcttcaatgaagtaatagcttcaattgctgatgcgcctgttgctaacataggatcaacaacaatgatttgtctttcagtaatatcttgaggtaacttagcaaaatactctacagcctttaatgtttcgggatctcgatataaaccgatatgtccaactctggctgcaggtactaaacttaaaataccatcagtcatacctaaaccagctcttaaaattggaacgatagctaattttttaccagctaatcgtttagccgtcattttagttacaggcgtttcaatatcaacatcctgaagctctaagtctctagttacttcatatgccatcaacataccaacttcgtctacaagttctctaaattctttagtacctgtatttacatctctaatatagcttagtttgtgttgaattaatggatgatcgaaaacgtgtactttactcataaaaattactcctatctttgtgtatgtttattgatatagaggatattcagctgttaatttcgcaacgcgttctttagcttgttgtaatttttcttcatctttactatttttcaatgctaaactgatgatttttgcaacttcctcaaaagctttttcatcaaatccacgcgttgttgcagcaggtgtacctaaacgtataccactcgttacaaaaggtttttcttgatcgaacggaatggtatttttgttacatgtgataccaactgaatctaaagtctcttcagcttctttaccagtaagtcctatagacccttttacatcaacagctactaagtgattatctgtaccgccagaaacaattctaaatccttcattaattaatgcttctgcaagaacttttgcgtttttaaccacttgttgttgatacgttttgaaattattttctaacgcttctccaaaagcaactgcttttgctgcaataacatgctcaagaggtccaccttgaataccagggaaaattgttttatctatgtcttttttatattcttccttacataaaatcataccaccacgtggtccgcgtaatgttttgtgtgttgtagttgttacaaaatcagcatattctactggatttggatgtaaacctgccgctactaatcctgcaatatgtgccatgtctaccattaacttagcgtttacttcatctgcgatttctttaaactttttgaagtcaattgttcttgaatatgctgatgctcctgccacaataagcttaggcttatgctctaacgctaatttacgaacttcatcataattgattcgttctgtgtctttatctactccatattcaacgaaattgtagaatttaccactaaaattaacaggcgctccatgtgtcaagtgaccaccatgactcaaattcatacctaaaactgtgtcgcccatttctaatgcaactaagtaaacagccatgttcgcttgtgaacctgaatgtggttgaacattgacatgttcagctccaaacaatgctttagcacgatcaattgcgatgctttcagtaacatctacaaactcacagccaccataatatcggcgtcctggatagccttcagcatacttattagtcaacactgaaccttgtgcttccataaccgcttccgatacaaaattttccgatgcgattaactctatgttgctattttgtctctgaaattctctctcgattgcttctgcgataactttatcttgcttggtgatataagacataaaatctccccttctttcaaaaaaacttattggtatttagcacgttcgccaccaatctttttcggcctagatgtggcaatagttacaattgcctgtcctacttgctttactgaggtccttacaggtacacatacatgtttaatatgcatgcctattaacgtttgaccaatatcaattccacaaggaacagtaatatgttcgaccacgatcggatccttcatatgctgaaaagcgtatgttgccaaactccctccagcatgtacatctggaacgacggaaacttcttccattgttaatggattatactgagatttttctattgttatcgctctgttgatatgttcacatccttgaaaagcaaaagtaacgcctgtctctttactcacaacatctaatgcattaaaaatagtttctgcaacttccatcgaaccgacagtccctattttttcgccaatgacttccgatgttgaacatccaattaaacatatatctcctttattaaaaaaggacatatcttttaattcgtctaataacattgtcaaatctttcataaaagcccacccttcctaaaaataaaaaaggaatatagcaaagtgctacactcctctattataacttatttaactgttaacatatactaattatacagaattcctactagcaaataatatcttttaattttaaaattaaacttacaagttcttcataggtatgtacatacatttcttttgttccaccgtatggatctataacttctcctgcttcttttacatattcatgcaatgtgaaaacatgattttgcaaaccaaagtgtgcctctattaattctttgtgcgaatacgacatcgtcaaaataatatctgctttcaaatctgcttcagtaaattgttgcgataaggtcgtttcagctaaatgatgttcttcaactaagtcttcaacataattcgaaacaccttgattgttcacagcgaatatacctcttgattcaaattgatgatttggcataacctcttttgcaatactttccgctaatgagctacgacatgtgttacctgtacaaacgaataaaatcttcatagttcacatcctttaataatgtgattacctgcagcttttaacatgcgattcataattgcttctgtattatcattcagctcaaagccgtatatatacgccgctgaaatattttcattttcatcaagtgaatgtaacacatcataaagattatgacttgcttgtttaacatcattgtcatcctgacataattgaatgaattgcgcttcacttggtataaacgccaccttattactcggcacaataaaagctatagaagaccaatctttaccgtcatttccaattttgctctcaatatctgtaataattgtaagtggtgtattgggtgagtaatgcttatacttcatacctggtgcaattggctgttcagtatcattataatcagcatgggcgatactattcggaagtatttctgtaatcattgctgctgttatagaaccaggtcttgcaattttataaggaaaagatgtgcaatctaaaaccgtactttctaatccttcttcactttgttcagcttgaacaataccatcgatacggccattcaaatcttgatatacatgattgaaagttgttggtgaaggtctaccacttaaattagcacttggagcagctagaggttcatttatgatttgtaataattgtctacctacagaatggcttggcattctaacagcaactgatgataaacctccagaaacttttcgacatagatagcctagctttaacggcaatataaacgaaatagggcccggccagaatgcctgcattaacttttctacgcgtggatccaaagtatatgtaaaatcttttaattgacctttactgtgtatatgaacaataagcggattgtcagatggacggcctttagcttcatatattttagctacagcttcttcatctgtcgcatttgctgcaagtccataaactgtttcagttggtaaacctattaaaccaccgtttaaaacaatgtcttttatttcattaattttaggatattgctgtaaatcttcattatattctctaacatcccaaattttagtatccaacttaatcacgcctttcttatttatcataatataaagcaaaaagctatgcacttaactaatcatagcaaaggcataacttctaattaccatttaaatgagacgattcgatcgtggccatttatatctttaataatgtcgatttttttgtcaggaaatttatttaaaattattgatttaagtgcctcaccttgattgtaaccaatttcaaaaacaactgggctgcctttttccataacgtgaggtaaatcttcaatgattgattcataaatagcatatccatggttatctgcaaacaatgcctgatgtggttcgaatctcgtaaccgttggagacatcgtaaccatatctttttcatctatatatggtggattagatatcaagccgttcaacttgataccttcattaattaagggctttaatgcatcccctgttaaaaattgtatttgtgattgatgcttctcagcattattacgagccatattcattgcttcaagtgaaatatcagtagcaataacatttaaatccggcttttcacatttcaaagtaattgcaagtacaccactacccgttccgatatctacgattgttgcatcatcttctaactgttgtaagaaatgcaacattacttcttcagtttcaggtcttggtatcaaacaatttgagtttacatcaaacgttctaccataaaatgaggcaaagccaactatatactgtataggctctcctaataacatacgttgtaatgctaagtcgaacttcataatcatcgctttcggcatatcatcatgcatgtggactacaaagtccgtacgcgtccattgaaatacatctaacattaaccattcagctcgtgtttgttcaaaccctttttgttgtgttaaatgaattgcttcatctaacttttctttataattcaccattattaagttctttcaatttatctgtctgctctgataaagtcagtgcatctataatttcttctaaatggccttccataatttgccctaatttttgaagcgttagacctatacgatggtctgttacacggctttgtggataattataagttcgaatacgttctgaacgatcaccagtaccgactgctgatttacgttgtgacgcatacttttgttgttcttcttgaactttcatatcgtataaacgtgcttttaacactttcattgctttttcacggttttgaatttgagacttctcagaagatgttgcaatgacaccagttggtaaatgggtaatacgtactgcagagtcagttgtgtttacgtgctgaccacctgcaccacttgaacgatacgtgtcgatttttaaatcttcatttctaatttcaatttctacatcttcaacttctggtaaaactgccactgtagctgttgaagtatgaatacgtccacctgattctgtttcaggcacacgttgaacgcggtgcgcaccattttcaaatttcaatttactatacgcgccattaccagaaactgagaaactaatttctttgtaaccaccatggtcactttcagacgcttctactatttcagttttgaatccttgtgattcagcatactttgaatacatacgcattaaatcaccagcaaaaatcgcagcctcatcaccacctgctgctgctcttatttctacaataacgtctttgtcatcattaggatctttaggaatcaataatattttaagctcttcttcaagatttggaagttcagctttaataccattactctcctcttttaacatttctacttcttctttatcatcagtctcacttaacatttcttcaatatcagctaattcttcttttttagctttatagttacgataaacatctacagttttttgtaaatcagcttgctctttagaatatttacgtaatttatctgaatcatttacaacatctgggtcacttaacagttcatttaactgttcgtatctttcttctacaatatctaattgatcaaacacttataattcctccttattattatcactaggtgctacgatatggtgcgcgcgacaacgtggctcataactttcattggcacctactaagataatcggatcatcgattttagctggtttaccatttattaatcgttgcgttctactagatgaagaaccacaaacagcacaaactgcttgaagtttcgttacttgttcactgacagccatcaatttaggcattggttcgaacggttcgcccctaaaatccatatctaatccagcaacaataacacggtgtccatctgctgatagtttttctactatacttacaatttcatcgtcaaaaaattgcacttcgtctattcctataacatcaacattagttaagtcgtgcgtcataatttcacttgctttagaaatattaatcgcttcaatggcattaccattatgagagaccactttttctttatgatatcgatcatcaatcgccggtttaaatacaacgactttttgtttagcgtatataccccttcttagacgtcttattagttcttcggatttaccgctaaacatactacctgtaatacattctatccaaccggaatggtaagtttcatacattgagagttccacctttttcaaaacataatcgctttattatatcatatttcaaatattcataaatgtctttttcataattatatcgatattgtacatgaacaattattttataaatttgtcttgcatatttatatacagctattctaatttgttgcttcttattcgtgcgatgtttctactcaatacaaactttaataaagggggaaatttatcattatgtattaacaacatggtattgagtcacttctttgaacacagtcgtaagtatatacccttactacgcttataaataaaaaagctgtctacaattccattataggatgcagacagcttaacgattactatattagttgtttgatttaagaccaaactttttgttgaaacgttccacacgtccatccgcagcagcgaatttttgacgtccagtgtagaatggatgtgaatcagatgaaatatctaaacgaataactgggtattcttttccatcttcccactccatcatttctgaagatgtttttgtagaaccgcttaagaatttgaagtttgtagtagtatctaaaaagattacttggtgatactcaggatgaattccttgtttcattattttcagctcctttgccctgaaccatctggaacagagttatttgtgagtttttacccaatactgtgtaattataaaggtaattaattcaaaacgcaagcccctatataatgtttattaaattataggtcgacccgttttagtactttcttctgcagacttttgtagctgcttgaagaaatcttcattattcttagaccttttaagtttgcgaataaatctttcagtaaagtcagttgagtcagtgaatagatttcttaattgccataatgtgtctaattcagatttacttatcaacaattcttctttacgcgttgaacttctgccaatatcaattgcagggaagatacgacgttcagacaatttacgatctaaatgtaactccatgttacctgttcctttaaattcttcgtaaatcatatcgtccatacgtgaacccgtatcaactaatgcagttgcaagtattgttaaacttccacccgcttcaatatttctcgctgcaccgaagaatgcttttggtttgtgtaaagatgcaggatctaaaccacctgataatgtacgaccacttggtggaataactaagttataagcgcgtgctaatctcgttatagaatccattaaaataatgacatcttccccaatttctactaaacgctttgcacgttcaagtaataattcagctactttaacatggtgttctggtggttcgtcaaacgttgaatgaacgacttcagcagcttctactgagcgttctaaatctgttacctcttcaggacgctcgccaactaacaaaataaatagctttgcatctggtttgttcgtactgattgcattcgctatttcttttaataacgatgttttacctgctttaggtggcgccactattaaaccacgttgacctaaaccaatcggtgttactaaatccatgatgcgcgttgaataattttgtgtttctgtctctaatttaatacgctcatctggataaagtggtgtcaaagcttggaaatgcggacgtttcttcacttcttctgcgttatggtcattgacaaagtcaacttgtaataagccataatatttttcgttatctttaggttttctaactttcccagttactttatccccacgtttaatttcaaaacgacgaatttggctagcagatatataaatatctttttcccctttagaatagttcactgttcttaaaaaaccataaccatctggttgtatatcatctaagataccttccatataatagttaccatctttttccatttgtgcttccataatagctagaacaagttcttttttatttaatttactatagttcgtcaacttaagagttttagctttttgagtgagttccttggtagtatagttcttgtacaattcgtggaatgattcatactgaggagatgtacgttctctttcaggcatatagtttacacccatttcattattttttagttagtaagtaatagataggcatgacaatgcataaataactgtgctagcacaatcccattatgctaatccccaaccttttaaatacatgaataactatagcaaatttttattttaattacaaaatctatttataaaaattgcaaaattaaaacagtacacaaaacttaattagtcatgtgcactgttttattgcgatttttaattcaaaaatcaaatttatttaaaatatccagctatagatttcacttctaagaactcttcaataccataatcgccccattcacgacctaaaccagattgtttatagccaccaaatggtaaatctggctttctacctgcttcgtttatttctactgtacctgcttcaatagaacgagctactttatgcaatgtttctttgtccttaccaataacatatcctgccaaaccatattttgtatcatttgcaatttgaatcgcttcatctaaatcgttataagtgataactgacattactggcccaaaaatttcttcttgtgctatcgtcatttgattatctacattaataaaaattgtcggacgtgcaaagtatcctttttcaagtccttctggtttaccaggaccaccataaaataattcagcaccttcttcaatacctttattaatataattttgtacttgatcaaattgttttttactaatgatagggcctacttgtgtaccatcttctcttggattaccgacacgcacttggctaaattgttcttttaattcagctaagaatgcatctttaattttgttaggcactaaaacacgtgtaccagctgtacatacttgaccagtattattaacaactttgcctgttgttgctttagccgcttctttaatatctacgtcatctaggacgatatatggtgatttgccaccaagctctaatgatacctttttaaaatctttagcggctttttccataattttagaaccagtagggcctgatcctgtaaatgacatcatgcgtactttaggatgttcagataaaggattcccaacaccagcaccatcaccattaacaaggttaaatacacctttaggaacaccgactttatcaaaaatctcagctaaaataacagctgcaaatggtgtttcttcagatggtttaagtacaactggactaccagccgcaaatgctgctgctaattttaatgatgtttggtttgtagggaagttccacggtgtaattaatccagatacaccgattgcttctttaacaactaaatcatctccgcggcgttcttcaaattcgtagttatctaatgcgtctctcgctgcaacaaaatggtttagtcccatttgataatggacacgctcagataatgataaaggagcacctaattcatccgtaatagcttgtacaatatcgtcttttctgttttcatattcttttacaattttatctaataacgcttgtctttctttcacagatgtatgacggaactctaaataaacatcgtctgccgcctcgacggctttatcaacatcagctttattacctttagcaactttcccgattacttcttcggttgctggatttataacttctatcgtttcattactattactttctacccattcgccattaatgtattgctttgtgtagtctctcattattctttcactcctcaagaatgatttatatattatttatccgtaatgcatacgatataaacattacattccattatgatacgctcccttttaatatgttcaaaataaaatgctttaaaattttgctgcatctatttttttatatttttaaataaaaataactattcccacatcatcgcaaataatgcgaagacttagaaatagttataatcaatgctatgtttaaacgtcatgtaattatttagcagtacgttgatctgttaaatcgacatatgattgcgcccatgcttcaattggatgtaaagcctctgctaacgctttacctttttcagttagcacataaataatttgtactggactcgtagaaatgatttgcttctcaactaactcccattgtgcaagctctgacaacttaagacttaaagcacgtggtgttattgttttcaaatctcttttcatatcggaaaagtgtgctgaacagtcattacatcttgagagataattaatgattaatccattccaacttctaccaagtattttaaaagtttcttcgagatacggacatacttccatcatcttcacctctcatcaataaatttagaatgtaaacgaacaccattttttaatcagtataattattataccacaaaacaagataaatctatacagtttccgtccaaatatctgcacctaaagcttttaagtgttctacaatatctgtataacctctataaatatgtttaacattgtaaattgtagttacaccctcagcaattaaaccagcaataattaaacaagctcctgctcttaaatcgctagcataaacttcagcaccatgtaatgttgatggttttatcgttgctgtgccttcgtcaacttcaatatttgcacccatgcgctttaattcttcaacatgtttaaaacgctccggataaatcgtatcagttacaaatgaaggaccatttgccataaataataatggtgtaataggctgttgcaaatcagtagcaaaacctggatatactagtgttttaatatcaacaaattgatatggcgcattattattgatgcgaattctttcgtctcttacatcaacattcacacctaattcactaaatttagcagttaatgtttctacatgtttcggaacaatattatttaatataacattttctccacatgctgcagcgatacacatatatgtgcctgcttcaattctatcaggtataacttgatactcagaaccatgtaattctttgacgccattgattttaattgttgatgtacccgctcccttaatattagctcccatacttgttaagaagttagcaacatcaactacttccggttctttagcagcattttcaattacagtttgtcctgttgcataaactgcagctagcataatgttaattgttgcacctacgctaaccatatctagaaaaatatgtgcaccttttaactctttagcttcgattttcattgatgtcgtacttgattcatcaatttcagcacctaaagctttaaatcctttaatatgttgatcaattggacgtggcccaagtggacatcctcccggtaaaccaatcacacattttttaaatctacctaacatggcacccatcatatagtatgaagcacgtaatgattcaactttattatttggtaatgcagcattttgtatttcagttgtatcaacttctaattccgtaccatttagtgatgccttaatatttaaatcttctaataaactcactaaagttttaacatcagagatttgcggtaacccttctaatttcacatgtccttgaactaataatgttgcaggaatgatagctacagcactgtttttcgcgccactgatattaacttccccatttagtgtgcgtccacctcttatttttattacctcttgagccatatcatttatctcctttgtccattactttttaattttttgcattattagcattataaattaattttactttatttgtaaaatagtttattttaatcgttaaaatcttgtctttctattttcgattgattaataacaaatcattcacctttactaatatatgctgttcttccccacttgaccatggtctaaagtctgattattcaactaaatattgacgttgttttgacaattatttagttttaattctacggttttcacgtaaacttttttcataaattgctcattttccttataattatatcacaatcaattttgatatattttaccatttttacgctttcattttaaaatcaaactgttttatttattacttatacgacataaaaaagaagcaaacaccattttgtctgcttcttttaaaattaatatccctacgttattaataacttaaagactaaatattaattatttagcgcggttagaagtaccgaactctttaattttacctttaactgtttctttgatggcttcacgtgcaggtcctaagtatttacgaggatcgtaaacttctttgtcgttatttaaaacgtcacgaactgcttttgctgaagcgatttggttttcagtgtttacgttaattttagctgtaccaaatggaattgctttttggatatctttagtcgggataccagtaccaccgtgtaatactaatggtaaacctgtagataaaccgatttcttccatttctttaaatcctaattttggttcacctttgtatggaccatgaactgaacctaatgctggcgctaatgcatcaataccagttttttcaactagttcttgacattctttaggatcagcataaatgatgccgtctgctacaacatcatcttcttgtccaccaacagtacctaattcagcttctacagaaacacctttttcatgagcgtattcaacaacttttttagttgttgctacgttttcttcgaatgggctgtgtgaagcatcgatcattactgatgtgaaaccagcatcgatagcttctttacatttttcaaagcttgaaccatggtctaaatggattgctacaggaatagtgatgtttaagtcatgcattaacccttcaaccattttaacaattgtgtagaaaccgctcatgtaacgagcagcaccttcagaaacacctaaaattacaggtgcattttcttcttgtgacgcttctaaaattgcttgagtgaattctaggttattaatattgtattgacctaccgcataaccattttcttttgcatcaattaacatttctttcattgaaactaaaggcatgaaagttcctccttgagtgcttacgcacgtatttttcaaagtaattatatcaaaaaaatagcgtcaatgcattgaaatactgcagattaaatgtgtattttttgaaaaatgcgatagttatactaaatgcaaacgtatacatttttatacaatttaagccgttgcataatatgtagtcattaattacaatattttataagtagattggaggataaagatgtcaaaaatcttaaacacacaactaataggtatctttaataggctagaaaaacaatctttagaaattcaaatggccgcccaatgtttaattcaagcaattggtggcgaaggttatgtttatgtaaaaggttatgatgatttacagtttttcgaaagtttcattctacatagtgatgagcgtttaaaatctagccgaaaacttgacgctattaaagactttaaagaaattgactcaactgatcgtgtattattattcgcaccattttataatgatcaagttgcattagatattcaaaaacttatcgacttagatatcgatgtggtcttaataagcaacaaacctaaaacagatgatttccctgatcatctcgtacattttatcgatttatctacaccaagacctatagtctacactgaagattacgataagattgtccaaccacatgcgatggcattgaattatgtatactatgacatttatacacaaatgattgaaatgacaagagacttagaattataaaagtcactattgttatttcataccttgtcactaacataatattaaaattatacgaaaaaccggtactttcaatgtttaacaatgaaagtaccggttttattagcaaatttatttattttgttgatattttaatgaagcttcaataaatgatttaaaaatcgggtgcggacgatttggtctagataagaattctgggtggaattgacaagcaataaagaaatcatttgtcggaatctctaccatttctactaaacgtccatctggacttgtaccagaaatcaccataccatttgcttctaattgttctctatagtcattattaaattcataacgatgacgatgtctttcttcaatttccgctttaccataaacatcttgtgccaatgtgccttctttaattgaacatggatataagcctaagcgtaatgtaccacctaaatcttcgatatctttttgttctggtaataaatctataattgggtatggtgttgctgggtctaattcagctgaatgtgcgccttcaaggcctaatacgtttcttgaaaattcaactgttgcaagttgcattcctaaacaaataccaaagaatggtacattgttttctctagcatacttaattgcactaattttaccttcacttgcacggaaaccaaatccacctggtactaaaataccgtcgacatctgcaaggtattcggctgcattttcatctgttacttcacttgaatcaatccatctaatgtcaatatctttggcaaaaggatatccagcatgtttcaatgattcaacaactgataaatatgcatcttgtaagctaacatatttacctactaaaccaattgtaattttaccatctaaattattaacgatatctaacaactgtttccattcatcaagctgtgtttcatatttcgcgtttaattgtaaacgtttaataacgatatcatccatattttgttggcttaattgtaatggaatttcgtataaagagtctgcatcacgacattcaataacactttctttattaatgtcacagaataatgcaattttatcttttaaatcttgtgtcatttcatattcagttcttacaacgattaagtctggttgaatacctaagcctcgtaattctttaacactatgttgtgttggcttcgttttcatttctccagcagctttaatataaggcagtaatgtacagtgaacatacataacattttctctacctaaatcgctacgaatttgacgaatcgcttcaataaacggtaatgactcaatatcacctgttgtaccgccaatttcagtgataacaacgtctgcattcgtactttcccctgcaagtaataaacgttctttaatttcatttgtaatatgcggaataacttgaactgttccgcctaagtaatcaccacgacgttcttttttcaatacgtgtgaatacactttaccggctgtcacatttgaaaacttgtttaaattaatatcaataaatctttcgtaatgtcctaagtctaggtcagtttctgcaccatcatccgttacgaatacttcaccatgttgataaggactcattgtacctgggtcaacatttaagtatggatcgaatttttgaattgttacatttagacctctatcttttaataatctacctagagaagatgctgtaatacccttccctaatgatgaaactacgccacctgttacaaaaataaattttgtcatgtcttgacctcctaattattaaagggaatgcttcctcatcaattgtaaaaattacgtaaaacataacattaaagcaagctcattcaagttgtttatttgtcgaattcgacaaaattaaattctgtttacttaccgtttccatactgctatgtcactatgtatatcatttacaactttgatttttgcgttatcatttcttgatttactcaattaaataaaaaaacgctccctctcacaaattctgtaaggggagcgtataaattttatacacgtgtcctatttaaaggagcccgaataaaattttatcatctttcaactaaaagtcaaacaaaaaattaatcgttgaagtcttcttcgtcttcaaacacttcttcgtcttcgtctagttcatcttcatcttcttcaatgactatatccgaatgattgatttcttcttcaacctgctcatcttctggatcatttagttcttcttgatcatctgtttgagctggaatatcatcgtcgtcatccatttcatcttcgcccaataattttaagttttgatcttcttcatcatctgcatccagaatatcgaatttttgaatagttggtgcgattttctcttcaatatcatctaccgaataccaatcacgtaatccccataaattttctccaacatttaaaaaacgaccatctgtgtttaaatccgtgtaaaattgtacaacacgattttcaatttcttcgtactcataatcacctaacgctctaaattcatcgatgatatcatataagttcattgtttcgcctttatcattcaataatgtataagccatatcaataaatgatttttcatcaaccatttgttttgtataatcttgaattttcattgcccaatacttcctttcgaaggatataatctaaatttatacgtctgaattcatttatatatagtaacaaaactaaattataaatgacaatatcatatttcgcaatcactgttagtaatttaaatatttttcgaaaacgacataatcatcagtttgttcgatttcaacgaaattactatttaaacataatggtttaaaatcattattctctccaaacagaatcatcgtaatcacattaaggttgtcatagttttttcttaagtaagttggcaattgtcgcagagcacttgaaccaataccattaaagcgatatgatttatccacttcaatagcagcaatgttcatgcgttcaccaatctgctccaatgcgataaagccaaccttttggccatcaatcattaaattaatgatatgtacattggtcacttctgaacgactttcttcttcaagctttaatgatgaaacatgttttgaatctaagtccaagtaatatagtcgttctttgccaattggtccttcttctttagtcgctgtatgcatgaatccagcacgttcgtataggttccaagcattgtcattttccgcatctactactagatatagatgattaaaatcaggaaatacaccttgaacatattgcggcaatgacatcattattttcgtgccatatccaaaaccttgatatttttcattaatcgataatgaacgaatataaacgacattttcaggtgtatcataaccttcatgctgatagtaacgatgtaatacaaaaaagcccaccacttcatttttatcgtttattgctacgttagcaatcctatcagcatcattaattgcatcatcaataacttctttaggtaaagatgaatatatttgttgtctttcattcaagtcaaaatcattaattgctgaacgatattgttcatcaaatgcttttaaagtgataccttcaaaacaaagttctttagccatatatttaacccctatctttttatatatgaagcatgaatccccatattattttacctattatttcactacgataccattatttgctctaagtcaaataaattacttatttatattttttaaatttcaaaattaatgtactattcctcattacttatcattttaatcagagacttacaaatacactgcgtacgaactacttttaatattgcgtcactaactaacaatcctatacaacttcaaaattcctagaaaataatatatataacttaacgtccacgtttgtaaaacattaattgcgatacgcttacaatgttgaaatgcaatggcatcaaatttgttaataattactattattacttgttttttagtcattttactatactattatttaaggatagacattaataatgaggtgggaatcttatgaaagttggcattgacgctggcggtacactaattaaaatcgttcaagagcaagataaccaacgtacttttaaaactgaattaactaaaaatattgatcaagttgtggaatggttaaaccaacagcaaattgaaaaattatgcttaactggaggtaatgcaggtgtcattgctgaaaacatcaacattcctgcacaaatttttgtagagtttgatgctgcatctcaaggactaggtattttgttaaaagagcaaggccatgacttagcagattatatttttgcaaatgttggtaccggtacgtcactacattatttcgacggccaatcacaacgtcgtgtaggcggtatcggtacaggtggaggcatgattcaaggactcggttatttactaagtcaaatcactgattataaacagttaactgacatggcacaacacggtgatcgtaacactatcgatttaaaggttagacatatttataaagataccgaaccacccattcccggtgatttaacagcagctaattttggtcatgtactacatcatttagatgctgattttacacctagcaataaattagcagccgttattggtgtcgttggcgaagttgttacgacaatggccattactgttgcacgtgaatttaaaactgaaaatatcgtttatatcggttcttcatttcataataacgctttattacgcaaagttgtggaagattatactgtgttacgcggttgcaaaccgtactatgttgaaaacggcgcattttcaggtgctattggtgcattatatttagaaaaatagaaaaagaccatttatatgcgcgttgttttaaataaacgctatataaatggccttttattttatggtctaagtgttttgaatacgtattgttccatttattatcacttaattacttacaactcaattcaattaaaatgtaagttcattagacaatttttgcgctgaaacaattgtaccaaccacgccagtttttaaatctatcgcaacggctttatgatcatctctaagttcatctagccattctccgaaaacagaaccttcaatcgtaattaaatcacactcttcaaaatcttcatctcgaacttttaacgctctgtttttaatactccatacaggcataatatgcggctttttttcgtcgctatcattttcactaatgagaataaactgcttactaccttttttagttaagccgtatacttcatcatatttcgctacatcttggacaaattctttgattctaattttatctaattccgtcatcacttcttgtgtaacagctacaacgtttagtagatgcccttcttcttccattgtttgattcataataatatggtcttgttcatcaaacaattcatctaattcataagtagcaaaacgatcaacgtccatttttacaactttatcaaatggaatatcacgacttgttaaaaatgatacggccacactttcttctgtccaaacgcctacatacgcttcacttttataatttaggcgtactagttttttatttttagaggcgaaataaatacattcatttattaatatatctctaaagaatggatatgctttataagacatgcttgaccctcactttttaaaatatgtcatacataaaatagtaaatgactccaacaagttagtcaattagacatattatgaattcaatttaatgtcatgtttttcattttaaaaattcaatagcattaaattttacgtatacacaaattcggtctataacacgaaacatatctagttactaaaaatttcaaaacgataacctttagtatacctttatcaacaaaatggcaactcttataacatagtgaaataaaagtcgccatttaatattagtattacaaagtattgccatatcataaatttaattactgttgactagaatcgaaaaaagcttgttacaaacgcatattcagtcaactactggcaacacaacattgtagcgccttatgttccgaactctaatagtgttcaagttcagctaaaaatgcgcgttcattctccagtactgtttcttttgaatcaccatgccaaatacagccaaaccttgatttaactttatcttcaccgtaccaatcaccatcataataagataacgggtataaactaccttctttgacatatttcaaaatcgtattgaagaaatgtgtgttatcaccttttgaatgataactataaaacttttgatatcctgaattcaactcgttagcaagtaataacatgctcgttgaaccattttgtctaaagtttaaatcaatcgcataaacgttatcatcctcatcgacgagtaggtcaaaaccagctacaccaaagaatccttgattcacaccgttttccataatttgtctacctgcttctataacgtgctctggtacattagtagtattttcatttccgttataaaatccgtacttatccgttaattgcgttgccgcaccaagatattgaatgcctagcgattccgagtatgcaaactgaacgcaataattcgctttttcttcaatcttctgttcgataataagcgaattcgtttcagcagttgcctctttaatacgcgttatcgctttttgtaaatctgcatcatgataacaaatcataacgccatagccacctgctgtcggaagatcatctcccggcttaattactaacgggaattcccaattcttaatctcgttttcgaattgctcaatttttacaacttttctttttggtaaaaacttcccatttgtccattcaggtattcttgctttattatttaaagcaacaaataacgttttatctaatgcataatattgctgattcaagattgtttcatcatgaatatattgaaaataaatctttttattttccttatgtgccaattgtttgatcaagttttcgtaagattgctgattgttaaatgtataaattgagttcggtacttccttaccaataacttgaaatagctgatgcaatttgtctgtcgcactagcttcgtgaacaataacaggtaattggtttgctattaataactccctaccagttaaaaaattagattgatgttcgtccggtttcaaccatggattcgatatatacgaaggtcttgacgtatagacaacatctttgtcatataaatcacttaacgttaagttcggctcattaccattatttgtcattacttcccattccctttcaaatgcgcatgctcttcaataatgtcttgataaacgtcttgatttgtaattaactctaaccccatcaacgccattattttagcgcctttaattaatgcttcatcaccatgtacactcgcagccgcttctctaaatctatgcgtatgtcctactaaattacgtgatcctattttaatatgaggatgtattgttggcacaacatgacttacgttccctgtatccgtagagccataaccaaaatcatcatcaataactgcttcaccaacttcttcagcatatttagcaaataaatcatctaatttcggcgttttaatgaattcattcacaccgttttgaattcgaccaaattcataatcacaaccagtctgtatcgcagctccacgtgcgatttgatttactttttctgttaatatatccaattctttacgcgtcattgctctagtataaaaacgagcatgtgtatagtctggaataatattagctgctttcccgccatctaaaatcacaccatgcacacgttgatcttttttaatatgttgtcgtagttgtgctacaccattaaaataactaatcatagcgtctaatgcatttaacgcttcatctgcattttcagaggcatgagcactttttccgtaaaatttaacatctaaaacatccactgccaaagtatcaatcgttttataagtttcatttcccggatgaatcattaaggcaatgtctatttgatcaatcacaccagccttgacataagaagctttagcgctaccattttccccaccttcttcagctggacatccaagaacgactactttaccaccaatttggtcaatcacttgcttcaaaccaattgcaccaagaacacttgcagttccaatgatattatgaccacaagcatgacccaatcctggcaaagcatcgtattctgctaaaaaacctatagctggcccgtcaagtcctgaatcatatgtcgctataaacccagttgcatgcccagcaatctcggtttcaatttcaaaatcatgctctttcaaacgatctattaaagttcgagacgcaaatatttcttcattaccaagttcaggacgttcatgaattctatgactgatttcgatataactatatttatttgtttctatataatcgagaatttgttgtttttcactcattttttactatctcccttttaccctacactcattttaatcatccacaatattttgttctttcaaaatgaattattacttattctatcggttttatctcatgatgtcatctagtttttctttatttacaaaattttctaataactaaaagcctttcataaatttataaaacagtttcaaattgtaaaacataagccctattgttacaatttaagtattgttagaaacacaacttacaacaaacttaagttttataatgcaacaaatcataagcgttttatagttttgagtagttaataggaggaaattcaaaatgacaaaaatgaatgttgaaagtttcaatttagatcatactaaggtggttgccccatttattagattagcgggaacgatggaaggattaaacggagatgtcattcacaaatacgacattcgtttcaaacaaccaaacaaagaacatatggatatgcccggactacattcattagaacatttaatggctgaaaatattagaaatcatagtgacaaagttgttgatttaagtcctatgggttgccaaactggtttctatgtatcatttattaatcatgataattatgatgatgtattaaatattgttgaagcaactttaaatgatgtgctaaatgctactgaagtgcctgcttgtaatgaagtacaatgtggctgggcagcaagtcattcattagaaggtgctaaaactatcgctcaagcatttctagacaaacgaaacgaatggcatgatgttttcggtacaggaaaataaatcttagtcaatcaagttaatcagaaaagcagtcgaacaatgattttacaatcgccattgtccaactgctttttattatgcttcaaagtcaaaaaatcgaacaaatgaaaaagtaaaatctttaacatttgtccgatttatttgagaaccactataatttcttaattagtcccattaacacgaactgcataggtaaccttaaatatagttgccatgttggcaattgtttatctcctaaaggtaactttttaactgccatatagatattagctgggaatacagctagcaagaatagattgattgtatttttcaagcattgagatggtcttttaattaaaagtgcaagtccaaataatatctcaaagattcctgtaacaagaaccgctgtttttcgaagtggcaaacatttcggtatgatatttctaaattgtcgttctcgtgtaaaatgcaatacacctattacactaaaacctattcctaataaatatcttagtatgttcaatcagcttcaactcctattctgtaatgattttatgaattaatgtaggcgatacaacatgatcagcaattgttatgcttgaatctaattttttaacaacatcgtctacatcttggcgattactgtgaatcgttaataatgattctccttcttctactttatcaccaatttttttatttaaaacaataccaaccgctaaatcaatatcatcctcttttgttaaacgtcccgctcctaacatcatcgaagcgacacctatatcgttagagactaattcagtcacataacctgattttttagctttatattcaatttgatattgagcttgtggcaaacgctctggatggtcaataacagtttcgtcgccaccttggtttttaataaatgttttgaatttttctaatgctgcacctgaattaattgcctcaattagcaacgctctcgcttcttcaagcgtttcagctttgtttgcaagtacaaccatttgagaacctaatgttaatacaagttctgttaaatctttcggaccttgtcctttcaacgtatcaattgcttcttgtaactcaagcgcattgccaatcgcacgtccaagtggctgattcatatcagaaataatcgccatcgtattacgtcccacattattaccaatacgtaccattgcgtgcgctaatgcttcagcatcttctaatgttttcataaatgcaccgctaccagtttttacatctaatacaattgcatctgcaccagcagcaatctttttactcataattgaagaggcaattaatggtattgaattgacagtaccagtaacatcccttaaggcatataattttttgtctgcaggagttaaatttcctgattgtcctacaactgccactttattttcattaaccaatttcacaaatgttgcttcatctatttcaacatgaaaaccatcaattgcttctaatttatcaatcgtaccacctgtatgacctaatccacgcccactcatttttgcaacaggaacatctacagctgctactaatggtgctaaaaccaatgtagttgtatctcctacaccacctgttgagtgcttatctactttgacacctttaatatcactcaaatctatcatatcaccagaattaaccatagccatcgttaatgctgcacgctcatcatcattcatatcttggaaataaatcgccattgctaaacttgatgcttggtaatcaggaatatcccctttaacatagccgccaataaagaaattaatttcttccgttgttagtgtatgaccgtcacgctttttctcaataatgtctatcattctcatttttatcatccttttcttaaaaagcttaggacaaagcatctgcgctttctctagtccatttttaaaagcacaagcgaaaattattatagcaagctatcgatttcatttttaatatcacaatttcaatgcgatgttattattcttaaatagattggttataacgttaaagtccctattaaattatcttagaatcatcatggcatttatgatgtcttaaagctgatatcgacatacttatatatggttacgatgtcccatgcttacatatttttataaaattagtaatctgaatctgcttctaaaccttgcataatttgaacgcctgcgctcgcaccaatacgtgtcgcacctgcttcaaccattttattgaaatcttctaaattacgtacgccacctgatgcttttacttctatatcagcacctactgtatctttcattaatttaacgtcttctgcagtcgcaccgccacctgcaaaacctgttgaagttttaacgaagtccgcaccagccgcttttgttaattcactcgcttttacaatttcgtcatggtccaacaataccgtctcaataatcacttttactgtgtgacctttcgcagctttcaccactgcttcaatgtcttgttgtacatcatcaaaacgtccatcttttaatgcgccgatgttgatgaccatgtcaatttcatctgcaccattttgaatcgcatcttctgtttcaaatgctttcgtcgcagttgtcgatgcacctaatgggaatcctattaccgtacaaactaacacctctgaatcagctagtcgctctgctgcatatttaacatgcgttggattcacacatacagatttaaaatggtatgctttcgcttcatcgatgatttgatcgatttgcgtacgtgttgactcaggcttcaataaagtgtgatcaatcaattttgcactattcattttctatctcctcctttatggttgattataaaaatacggttgtaaattagttgattgagcgtcaggttcatttaaatatcaggttagatgttcgctttttatgtaaccgcatacatatactattacattaattcatttcccataaacaaacaatacaattgaacgtgatatcttcattatgaacgatgacttgacaacaagctaatcaggattatatttttataattctttaattctatagtacaaaaattcgcaaaaaagggaaacaaatgttatcttaaaattattaatgaatattaaggagaagataacaaatgacaaaaggtacaccacatattcaaccaaatggagtaaaaattgctaaaacagtattaatgcctggcgatccgctacgtgcaaaatatattgctgataattttttagaaaatgttgaacaatttaacgatgtacgtaacatgtttggttacactggtacatataaaggtaaagaagtttctgtaatgggttctggtatgggtattccaagtattggtatttactcatatgagttatacaacttctttgatgtagatacaatcattcgtatcggttcttgtggcgcattacaagaaaatgttaacttatacgatgttattattgcacaagctgcatcaactaattcaaattatgtagatcaatacaatattccaggtcatttcgcgcctatcgctgacttcgagttagtaactaaagctaaaaatgtcgctgaccaaatcggtgctactacacacgtaggtaacgtattatcttctgatacattttacaatgccgatccaacattcaatgatgcttggaaaaaaatgggtattttaggtatcgaaatggaatcagctggtttatatttaaatgcgattcatgctggtaaaaaagcacttggtattttcacagtaagtgatcatattttacgtgacgaagctactacacctgaagaacgtcaaaattcatttacacaaatgatggaaatcgctttagaaatcgcagagtaacttatttaaattgactttaattgctctttaacaatgcgattaaactcaaaaagccaacacattctgggcgtatccccatttatgtgttggcttttatttatattattacttatctgtagattagcttaagtaagatttaaacatccaattatgtttatctactgatgtttgcatacctataaacatatcttctgatacatcatcgccagcattaccagcaatttcgattgcgttttctaattgttttgagatatttgtgaagtcttgtgataattcttcaaccatttgttctgcagagtaacctttcgcagcttctttaacaattgattgctctaagcattcagttaatgtacctacagggtttcctcctaccgctaaaattctttcagctaattcgtctacatattggcttgcttcattatataattcttcaaatttaacgtgtaatgagaagaagttaggccctttcacataccagtggaaattgtgtagctttgtgtaagctactgtccagtttgctacttgttgattcaattcttttacaacatcttgttgattactcatatttaatacactccttaaaattgtctacgtcttgcttgtttatattaattattatattataataattctaatctgtaaagtgtttttactctcttttttataattattctaatctaaccgtaaagtgttccgctatttaaatgcctaaattttaattcatcatctaatatatccattatcaattagcaagtatgttttatcaatcagtaagttttactttcgcattatcatctaaaaagaacgatttttcataatcatttggttggtgccatgttgttttccacattctatttctattattagcaaacattcgataaccgaaattacggactggtttaggtacaagccataaacctacgcccaataatttagttcgattaggtagtgctgtgattagtttaataatcgcctgcgattcaaaatatatacgatcacctttctgtaaaatcacactatttttatttgccgcttctggatgttgtttaaaaaattgttggccaacttcaccttttaacgtggcaaattgataatttcttggtaggtcatgttgaattaaccaaatgacatagttataacaatatatacagtttccatcataatatacgattggcataatttattcgctcctttaatagtacttatagtcatttttcctaatttaaaaacatttaaacaaggttgtcacttgataagtcctcgcgacacgaaattgccataaaatttatttttcagttttatatttattgtataatgtattttttatttactttaaatttctcaatctacagtgtaatcttatttcttattattaacttagcgtttggtcattcgtcttattcaacataccactggaaaactcatataaagttttaattctgtaacataaattcttttatattcatatactgtctttattatttattaaaataaaaacgagtaatctatcataagctcttaattagctcttatggttgattacccgtcattttttctttatgcggttattcaaatatgcaattatgcaatttttaatcctatccttacttcttttcaaaaactaccatatatcattagtcatgtttgactttgactatacgtgtgtattttaaaaactgctctgaatatttctccttaatttcctctaaactgtcatatgtaatacctacaatatgccaattaggattgaaataatagaaagaatctttttgtcgtgaccatttaatcatattaccgtctttattataacgtggtaatgttacttcatagccttctaacacattaatatacgtttggaaaatgtctgtatctatacgattaaaattatcaataactaaataacttttatcctttttaggcattaattgagtaataaacccttcacgatagtataatgcccctgtttcatttggtaaatacttgccataaagcatatcttctgaaaaatcaggatgacctgttgttataacaggatttgcattcgctttttgcaataagtcattagccgcttttaagccttcttcttttcgatctacaacaagtaaaataaatggctttaacgcttcttctttttcactttcaagcatatctggtttttgaaccatttcaaatggagatttcaatccattattatcgctcatttcaataattgcatcatactgtgcttgtgacatacttgcaatagcctgttttgcattttcttgaaggaaatataagtttttcaatttaggatgcttatttaatgtacttaatgtaatcggtgtaatgtctttctcataagacacttcaatcactgtactatttgttctaccaggaattggtggtttttcatgaatatgctttgatacttctccaattccaacgacagattgatttttcgttcgattataaaaaataatattgtcgccttcttctaactgagtataaaaatgataaccattacgtttaataccgttgtacgtgtgcgtataaatcgtatattggtttccaggttcaaattcttcagtttcagctaaaaagaaataacgcggtatcttaatttcgcctttaccaagaccacttattaaatcaaactcttctgcagtgatttgattgaacaatgtctctttcatattacttatacgaaattccaaagcttcactacgctttaaataatctgctgttaatggtttcaattgttcattaaaacgaaactgtacacgtattttattttgtgcacctgtttcaacactaataatttcaccacatccaagtagtccagtatccgtctgaacttgataaaagatgacttgatctcctactttagcctttttaaacgctctaaatccttgagatgggttaaaatgtgcgcctgattcaaataaagctgtttgtcctactaacggttcattatgattccaacggttatatccacaattcaaccaaaaataattcgtttctgctgtcatcttaatactccttaacctgaataaattttagaaacactatgaattacattcttttagtgtttcttatgcagttggacgcgtatgcgaacaactgtataccctttgttcactgcgattttaatcgcatttcctataacattgtagcgcccaggacattaatttacgtcccagacccttatcgttttcacttctaagtaagtcgaactattttgctttacaacaagtgcgactctaaatacagttggacacacatacgagcaactgtataccttttaatcagttttctatattttatttattatatctgtcttaatgataaaaattgttacaaacagtttaacatatttagctacctattttgcatataaaaaacatgcttgcatacactatgcaataaaaattacaaatttatatatgataccactatgcttgcttatctctatagcgccattgatacacatttttaaatatctatactgccgttagaattttatcatgtcttaattttcattaaatattaattacttcattttatataaaccaacaaaaaccccctcactactatgcaagtgagaggttatgttgatgtactttattttcatcaatgtcattaacacaatcatatttcttctgttaatgcactgtattatattcaaacgcgctatcgacaattaatttgaagctacaaaggtaccgcataatggcagcacattaattaacaatgcgctaaactttaatgaggcgctgatttgcttgtctttaaaagtcaacatagcactgataattcctaaaatagctactatacgtggaattgtcatgctcggatactgcggtatatgtaagaaagcaccaagacctgctatcacaccacatactaacgcaatatatagaaattgcttcaaatcattcactcctaaattgttattacactattacacatagctaatcatcaatgtgaaatcaccttcaaagacactatccaaatcttcagaagtcaaaataaagtttgtaccagtagtcagtttgaaaatttcaccatcgacaatcatttgcccttcgccttccaacactgtaactaaacagaactctctaggcttcatataatttaacgtgccagaaatttcccatttaaccaatgtaaagaaatcattcgatacaatgtgtgtacacttatggttttcaataatttcgctttcaggcaaaatattaggtaatggtgcattgtactgaataacgtctaaagctttttcaatatttaacggtctatcattatattgattatcttgacgattgaaatcataaagtctatatgtaatgtctgacgattgcatcgtttcgtatgctaatattcctgaagaaatagtatgtactgttcctgctggaataaaatagaattctccaggttttactttaatatatctaagtatcgactctatcgttccgtgttgaacatgattcgcaacttcttctctagactctgctaatgtccctataactatttctgcatcttcttctgcatctataatataccaacattcagatttgccatattgcccgttttcatgctcataagcataagaattatcagggtgcacatgaatagaaagtgattctcttgcatccactattttagttagaagcggaaaatctttgcttgggaaatcaccaaacaattcacgatgttctgaccaaatacggtctaatgtttgaccttgatatggtccattaataatctcgctcgtaccatttggatgtgctgacacacaccaacattccccagttgtatcattgtctaattgatatccaaactcacttagacgttgaccgccccataattttgtttttaaaattggttgtaaaaataatggcattgttgcacctccattgtgattaagtaagcaatagaactctgatgttgttgttccattatattttgattttgttctcatttacatcgtattattaacttccacatttcaaattaactattagtgattgtaccatatttactaacattgcagtactgccaattaaagcgcttcacttaaatttacagtactttaacattttcaaaaatttatagcatagagattatatctctcttacatttgtacatatttccctttaaatttactcgcccattataccaattaataaacaactttaatagttgtgccatacattgttcaaattctttgtaaaacgcatagacaatacgtacttattcatacttataattcatcattttcaaaaaataacgagttacgaaaaagtaacccgcttcaaatcatatttactatccttattaatccgtttcattttcaaattgagttaaagcatctttaatgtcctgatcaccactaataatttgaaactcttggtgattaaaatgattggatgtgacaatttcttttaatactgtcgcaacatcttctctaggaatttcacctttaccatcaaaatattgtgcagcttctatctttccagatcctgctgcatttgtaagtgcccctggatgtaaaattgtataattcaaacctgaacgtcttaaatagtcatcagcgtaatgtttagctattgtatatggctttaaatcaccgctatcatcaaaagcctgacgtctcgaatcatatgttgaaaccatgacatagtgtttaatattggcctctttactcgcaatcattgatttaacagcaccatctaaatcgacaataattgttttatctgcacccgtgttccctccagaacctactgaaaagataactttatcgaatggtttaaacgtctcagttaaagtctctattgaatcattttcaacatcaacaagaattgctttcataccttgtgattttaacgcattaagttgatctgattgcctaacaccagcagtaaatggtacattttcttttgctaattgttgcactagtaacgaacctacaccgccattagcacctataaccaaaatattcatttacaacactctcctatttattattctctatgccataccactttatgagatatgtaaaacttgttacaactataaaaatcaattgacatactactgggaacgtattaaattaatatatgaacaaatattcatatgaaaggattgtcatataatgtcagaacaatattcagaaataaatacagatacattagaacgcgtaactgaaattttcaaggcattaggcgattacaatcgaatacgtatcatggaattgttatcagtcagcgaagcaagtgttggtcacatttcacatcaattgaatttatctcaatcaaatgtctcgcaccaattaaaattacttaaaagtgtgcatcttgtgaaagcaaaacgacaaggccaatcaatgatttattcattagatgacatccacgtagcaactatgttaaagcaagccatacatcacgcgaatcatcctaaagaaagtgggttataatatgtctcattcacatcatcatcatgaccatatgcatagtcatgtaactacaaataataagaaagtattgtttatatcgtttttaataatcggtctatatatgtttatcgaaatcatcggcggtctccttgctaacagcttggcattactatctgacggtatccatatgtttagcgacacattctcattaggtgttgcacttgtcgcatttatttatgctgaaaagaatgccacaactacaaaaacatttggttataaacgtttcgaagtactcgcagcgttatttaacggtgtaacgctttttgtaataagtattttgattgtttttgaagcgattaaacgtttctttgttccttctgaagttcaatcaaaagaaatgttaatcattagtattatcggtttaattgtcaatatcgttgttgcattctttatgtttaaaggcggcgacacttcacacaatttaaatatgcgtggtgcttttctacatgttatcggagacttattaggttcagttggcgccattactgcagctattttaatttgggcatttggatggacaatcgccgatcctatcgcaagtattttagtttccgttattattttaaaaagtgcttggggtatcacaaaatcttcaattaacattttaatggaaggcacaccaagtgatgttgatatagatgaagttataactactattaaaaaggattcacgaatacaaagtgtgcatgattgccatgtttggacaatttcaaatgatatgaatgcattgagttgtcatgttgttgtagaccatacattgacaatgaaagaatgtgaattattattagaaaacattgagcatgatttattacatttaaatattcaccatatgactattcaattagaaacgcctaatcacaaacatgatgaatcgattatatgttcaggaacacatagtcattcacataaccatcatgctcatcatcacgcgcatgtacattaataattttaacctactgccattgcatcgattaaacttttcaatggcagtaggttttttatgtctttatggcgacttgtttggtctttgatgatgcaatgtttattaacaaattttcaactattatttcttacattagtcatatttttgacaatttactattataattctctaactttagtcactttaattaatttttattagatattaatatgaaaataacgtgttttttgttattgtatttatatgaagaaaaggaggcaccactttgtttacttactttaaatcagcatttaaaaatgctaaaccacaattattaataacattgatatatgcacttatagcatttgctgtaattgcagttgtatatttacttgctaatttccagcttgctaagtatgcacaaactattgcaatttattcacaatttgggcaaaaaccaccagtagatgcatatttaaaagttatcgctgtattacttatagcagctgtagtttcactgtttgttttagttcaaatttttatcggaattacaaatgttatgaaacgagcaatgagtcatgaaaaagtaaaatttaccgatttatttattgcatttaaaaaaggtaattatttaaagagcgttctgatcggtcttgtatctatagcaatgattatcgttctttcacttctgacatcattactatacaaattattttctccagtatcagaaatgattatgaattcagtacaatcatcatatgcagatagtacacacctgattggtattgctattacaactcaaagcatcataatcattgttgttttattgattaaagcaattattacttggttattgttaatacctattttcaactttatgactagtttcgttgaatcaactaacgataaagtaaaaacacacttagctaatggatttaaagcaatgaaaaatggtcaaaaaacatttttcaaatttttcattggaatactattattaaacttaattattattttatttaaaacacctgttggttacttgatttcatttaatacgcaatcactctctcaaagtgttgcagaaaatatcataagagtttatacagtaatgacaattattttattcgttgttattcatgcaatcattttaatgggtatcgttcaatattacttaaaacgtggtcaaaaaattactaaagataaagtaaaaacagctgacaagaataaaaaagttgtcactgaaccaaaaaatacaaaagtagaaaatgataaagtgacaacatctgttgaaacaaaaacagaaaaagcacaagattcattaaatgataatacaacaaaaacaatgacttcagataaaccagaagacaatcaaccaaaataaattttagagccccttacaactttagttgttaggggctcttatgcatgcgcttagcgcaggcgctcctacttttaaactttagttgttaggggctcttatgcagttgatgcgtagcatccaactgtgttcctctatttttcaactttagttgttaggggcttctttctaaaataactaagtgaattatctatatatgaagaggtctccaatactttttatataattcgtgattacattctatacttttaattgtattttctgctgtatggaaagttggttttattaattctgattatgttcagaactacaattcataagaaaaatgtgttaaaatatatttgtagtaagtagaagcaaaagatgaaaatcattaactcttgaaacacaaaaagggcaacactcggaaacatgttaccctaatgagcccgttaaaaagacggtgaccttatattttatttaaaaatagccttcaaaaatgccggtcaaagcgaatagaaggttattttttatggtcttgagtactaatcaatactaaaccaatgattgttaatacaaccataagcatttcaaaatcagacatgctagtcctttctaggagtaacaactataaccataggcatcacccctttattaagagattagccaccatctatccaacttgctcaataaatattataacatgcacacttttaaacagtaattcatagtataagttttttcatttcttaatcaactcgataaacagttgagtgacatacccttgtctaactagctatttcttcccctgttatcgtttgttcatcatataaaaatttaatttctcattttttattctctggtaaagaggggcgcccgctttttcggcctctcgctcttgttgctgctaagtctattttatacactcacatagtaaattaacttctaatcctgaaaaatgcactcatcatcgtaaaaaacattttgcccattgtgtctttcgttgaaatgttcatgttactaatttgtaagtcaattccgttatcatcgaatcattgtgataattcaattaatagttttgtcgttctacctaaccgatcaagttgatagacaactaatgtgtcgctctctcgtaaataatctaaacacttaacaagctctgtacgtttgacaccacttattctttcactatatacacacccacacccaaattctttaagtgtatcgatattaatctttcgttgatacacgatcataaccaattttagccatttaaataaaacctctcttcaacatattatatttagttatgactcaaaactcattgccgtatttttgattttgtattaatatatcaaggctatcatcatctaataccaaatgaatttctccacttcgaatatcaatagcaacgtttatttttgattctaactttttcaaataatctatgtcagtaaatatgtacttagaaagataatcatcttcttttttaaattcttctttatcaattgtatatccgttctctaaaatttttgataactctataagagtattactcctactttctttttttacattagacactacatagtttatgaacttttcaatcaattgttcttccaaatcactataatcttgtgtgtcctttttaaataattcaaacataatattattggataaattttcattatatattaatcgctcgtacataccagaagcgctagagttgataaatctattcagatcgttttgtatttcgttcaaatctatattccctttactatcgtaatatgaataattactcattaatttttttaagaaatctctcaaaccaaagtaaagataaatatttgaatactttctggcattatcgtagtcttttacatctcttttatagtgatctatcaacatattcaattcgaaattatatccatgattaaaatcaaactcgccattgtcatattttctttgaaattcaaacttgtatatttctgcaactttatcatcgcaattttcatctatatagttttcaaccaaataataagcacgctcaagagaaatttcaccataactttgtataaaagaggttaagtactctgttttctttaaaatttcttctcctttcttagttggtatatatacatatggtaaatctaagttattaataatatgaaaattgtcgtcaatacgtttaattaagtcaggtttattacctgttgtttttataccaaaactttttaaaatactttgtaattcaggtcttgtctttttatatatactaacttcaaaatcattagtcgttgttaataactcagcttcaattaatttttttattgaattcataatttgaacatcattattagcaaggcacttattagcaaatatctcttctccaaccaatctatttacattagtgtgtaatactaataaatcacgtgcatttacgctcactagctttcatctcctcatttttgcttttcaaatttattaagtatgaataaaaaatacatccgaacaaacaaaatctctatattctaattcgatttacatagattatacactaaaaaaatgattctcaatgcaaatgaatgtgtctctcatagtctaaaaactcgtatgtttcgaattttatgattcattgataatagtaccagttaaaagaactaagattgtaattatccccccttaaaattcaagaatatattttcttaatctatcagcaagaggttatatttcaaagtgtttatttttaaaacaacatctaaaagccattttcataataatgttaaatcattagaatgtataaagattccaattaataaaaatagataaaatgcaataaagttccaaatacttattattattcatcacaaattacgtgatgccctctacaacactaaatcaaggatgatatttattttatatacattagcattcattgtttgcttacccacattatcctgtttagtcttttttataactctagtcttgaatgtcatatttacaaagaaaaaaacactaaaatatttaaaactaacactatttattcactttgttcttttatagcaccttttatgtttattttcttgtattcaataaatagtatggagatgataatttaaagtagatatatttgaagtatactatagagtaaattatattggggaaatatgtaaacgaaccggttgattttatagtggattaacacttcatagagaatataatcaagaacaaaaacagtcaataggtgtgaatttttttaaagacggatctgttgctactaaaaaaagaagtatacaattcaatagttaaaccttaaaacaagaaatattattcaaaatcaatgaatttcctatcttattagttttaacaatatttattctcatagagtttgtccaattaaatatagatgattcaaatatttataagcatacaaaagagcagtaagacattttctaatagaaaataactttactgctctttgtacattactcatcaactattgtaaattaaataataaataactacctattttattattcagctaaaaaatgctctgctaaatattttgctgcgccatcctcttcattcgtgtatgccgttacatctgaagttaatgcttggatttcagggcgtgcatttttcatagcaactgtataatgaccaaattcaaacattgctctatcattgtcgctatctccaataactaacgtttcttcttgatgaataccaaaatgtgcaatcatttctttaatgcctgtacctttatcagtttgataagccattgtttccgcattaaatcttgatgaatttgaaacactaatctgtagttgcacatgattttgctttaattcatctctaaatgctgttattttttctaaattagaactgaatagataaatttttgaatattcaccttcaggaaacttagttacccaatctatcttaccagcaagcgcatcttgtcttgaagaccattcactatgacttacgccattaataggatcttgactacgaatcatatctcgcatccatgtttcatcttcttttaaagaaactctattaccttcaaaaggaaatacctcataataaatttgttggcgcttagctaaattagtaatttgttgcacttgagccaatgataaaccatgcttgaagataatttctccatctacttctccaattgttccatttgaactaatgatgccattaaccgcaaaatcttgaggtacaagttgatgtatttcagaatgcgaacgtcctgttgccaaaaatactttatatcctttctctctcaattgattaatgacatctttcgtatacgttgatgcttgattattttcatgtaaaattgttccatccatgtccaaaaatattgcttttacgttatccatattgccctccactgtccattttatcttaattaaattttgtcattattacttattatttgcaaaatatttactctaacattgccatagaaaatcgattattccatctttgaactgctacatttttctggaaaaatcgtgacatgttttcagaagttaatatgtcttctacagcgccttgttgaatactttggccatcttttagcagtaaaattttggaaaagttagcagttatttcttcaataaagtgcgtcacataaatcatcgcaagcgttggatatgaatctgacaatgagtcaagtatacttaacaacgattctcgtgcaataaagtctaaaccagctgctggctcatctaaaattaaaacctggggttgccccattaaagctcgtgcaatcatcactcgttgtttttcaccggtagataaataaccaatatattgttgcgctttagcaaacattccaactaatttaagtaattgatgtgcttcattacgtatctcatcatcaatatcttgataaacaccaattgatttaaaggcaccgcttatcaccacatcgattactctttcaccctcttgaaacttttccagtaaactatgagatacaaaacctatatgttgtcgtacagtctctgcagaataccctaccttgcctggcattttaccgaaaaggttaacagttccagatgttgcaggctcatacgcatttaaaatatttagaagtgttgtcttgccagcaccattcaacccatataatatccatttatcacctttagcaatttgccaagaaatcttttttaaaattgtttttccttgcttcattcgcccaatttgatctaattgaattaacatgcgaggtcacccctttattgctactccatacttctcataaaatcatattaacataacacccttaattgtcagactatttaaataaataaaacacttcatttttacgcatttctgccaaattaagatgaagtaaaagctaagtcgacctaaaaaagcacccttctagtcgattaatctaaaagggtgccatatactttaattttaatacatgattgattctaaaaaagtgaattattccacagtaactgatttagcaaggttacgtggtttatcaacatctaaatctctgtgtaatgctgcatagtatgaaattaattgtaatgcaaccactgatactaatggcgttaacaattcatgtacatgaggaatgacataagtgtcgccttctttttcaagaccctccatagaaataatacatggatgtgcaccacgtgctactacctctttaacgttaccacgaattgataaattaactttctcttgtgttgctaaacctacaactggtgtaccttcttcgattaaggcaattgtaccatgtttaagttctccaccagcaaaaccttctgcttgaatgtaagaaatttctttaagttttaacgcaccttctaaacttacgttatagtcaatagtacgtccgataaagaatgcattgcgtgttgtttctaagaaatctgtagcaatttgttccataattggtgcatcgtcaacaattgcttctattgctgttgttacttttgctaattctctcaataaatcaatatctgcttcacgaccatgctcttttgcaacgatttgagacaagattgataatactgcaatttgtgcagtatatgcttttgtagatgcaactgcgatttcaggacccgcgtgtaataacaatgtgtggtctgcttcacgtgataaagttgaacctgcaacattagtgattgttaatgatttatgacctaatttattagtttcaactaatacggcgcggctatctgcagtttcacctgattgagaaatataaacgaacaatggtttttcagataataatggcatgttgtagacaaactctgatgcaacgtgtacttcagttggtacgccagcccatttttctaaaaattctttacctactaaacctgcatggtagcttgtacctgctgcaataacgtaaatgcggtctgcttctttaacatcattgatgatgtcttgatcaattttcaagttaccttctgcatcttgatattcttgaataatacgacgcattactgctggttgttcatgaatttcttttaacatgtagtgtgcataaacacctttttcagcatctgatgcatcaatttcagcaatatatgaatcacgttctacaacgtttccatctgcatctttaataataacttcatcttttttaacaataacgatttcatggtcatggatttctttatattcgcttgtcacttgtaacattgcaagtgcgtctgatgcgataacattgaaaccttcaccaacacctaataataatggtgatttatttttagcaacatagattgtgtctttgtcttcagcatctaataaacctaatgcatatgaaccatgtaataatgacacaacttttgtaaatgcttcttcagttgaaagtccttgatttgaaaagtattcaactaattgaacgataacttctgtatctgtttctgaaatgaatgatacaccttgtaagtattcaccttttaactcttcatagttttcaataacaccgttatgaactagagtaaaacggccatttgatgattgatgtggatgagagttttcatgattcggtacaccgtgtgttgcccaacgtgtgtgaccgattccaacaggtccatcaaaatcgctactatcagcaactttacgtaattctgcaatacgacctttttctttaaatacagttgtattatcatcatttactactgcgatacctgcagagtcataacctctgtattctaatttttctaaaccttttaataataattctttggcattatcatagccaatataaccaacaattccacacataacgacattttcctccatattggaatagtacgcgtaaattatgatttattgccgataatttagattgacaatctgctttcataatataaataggaacatgctatcatcgcattcatccataacaaattaagcatagttatttttacaactatacaaattgctcacactgtactttccatattaatattttttatattcaatttctggcgatcttattaactttgtccattaagtcaccctaatgttttacttaataagctaacgaatgagccacatccgggatagcatccgccgatctattcgatcactatcctcctcgtctacaaatacatatattgcactctataaaggccactcatatattaacctttaatcttcaaatacaaatatttatttgcacaggcgctttaactgtactgccgaactttccccctttccattaatcattattgtacaacggtgttgttttgttttgcaaatattttcacaataaaattttaaaaatcctaaaacaatttttttgttttactttttcaaaatatctatactgtcacattgatgacactttatttaattttgtcacatttattttgacaaagttgatttttgtttatattgagtaacaagtaacctctctatacactatatatagtcacatatattaaaaaagaggtgtaaacatgtcacaaactgaagagaaaaaaggaattggtcgtcgtgttcaagcatttggatcattcttaagtagtatgatcatgccaaacattggcgctttcatcgcttggggttttatcgcggccatttttatagataatggatggttacctaacaaagatttagctactttagcaggaccaatgattacttatttaatcccattattgatcgcatttagtggtggtcgtttaatttatgatttacgtggtggtatcatcgcagcaacagcaactatgggggtcatcgttgcattacctgatacaccaatgttacttggtgcaatgattatgggtccacttgttggttggttaatgaagaagaccgaccaattgattcaacctagaacgccgcaaggttttgaaatgttatttaataacttttctgctggtattttaggatttatcatgacgattgcaggatttaaaattttagcaccacttatgaaatttattatgcatattttatcagtggcagttgaagcattagtacatgcacacctacttccacttgtaagtattttagtagagcctgcaaaaattgtatttttaaacaatgcgattaaccatggtgtattcacaccgcttggtgcagatcaagctgcaaaagctggtcaatcaattttatacacaattgaatctaaccctggaccaggtttaggtatcttacttgcttatatgatttttggaaaaggcactgcaaaagcaacgtcatatggtgctggaattatccacttcttaggtggtattcatgaaatttatttcccatatgtattaatgcgtcctttattatttatcgctgttattttaggtggaatgactggtgttgcaacttatcaagcaacaggatttggatttaaaagtcccgcgtcaccaggttcatttatagtttactgtttaaatgcacctagaggtgaattcttgcacatgttactcggtgtcttccttgctgcacttgtatcattcgttgtagctgctttaattatgaagttcactagagaaccaaagcaggatttagaagctgcgacagctcaaatggaaaatactaaagggaaaaaatcaagcgttgcttctaagttagtatcttctgataaaaatgttaatacagaagaaaatgctagtggtaatgttagtgaaacatcttcatcagatgatgatcctgaagcgctattggataattacaacactgaagatgttgatgcacacaattacaataatataaatcatgttatttttgcctgcgatgcgggtatgggttctagtgcaatgggtgcaagcatgttacgtaataaatttaaaaaggcgggcattaatgatattacagttacaaatactgcgattaatcaattgccaaaagatgctcaattagttatcactcagaaaaaactaactgatcgtgctattaaacaaacaccaaatgccatccatatttcagtggataatttccttaattcaccaagatatgaagaacttttaaataatctaaaaaaagatgatcaagcataataattaaataaattaaaaaatggaggataccgccatgttattgagtacacgtgaaaaagaaatgatagccctattgattaagtaccacggtcaatatatcactatacacgacattgctcagcaacttgcggtgtcctctcgtactattcaccgtgaattaaaaggtgttgaagcatatttaacttcattttcattaactttagaacgcgcaaacaaaaaagggctacgcattgctggcacagattctgatttaaacgatttgaagcaatcgattgcacaacatcaaaccattgacttatctgttgaagagcagaaagtaattattatatacgctttgatacaagccaaggagccagttaaacaatatagtttagcgcaagaaattggcgtttctgtccagactttagcaaagatgttagatgatttagagcttgatttaaataagtaccaactatctttatctcgaaagcgtggcgaaggcatttacttggtaggtactgaatcaaagaaacgtgaatttttaagtcaattaatggtgaataacttaaatagtactagcgtttattcagtaattgaaaatcattttgtctttcattcattaaatcaaatccacaaagactttgttgacttagagcgcatttttaatgttgaaagactattaatggactacctaagtgccttaccctaccaacttaccgaatcaagttatttaactttaactgtccatatcgtgctctccatttcacgtataaaaaatggagagtatgtcgcattaaacgatgatatttatgattctgtacaaaacacatttgaacacaaagtagcaagcgaacttgctgataaacttggtcaaatatatgacgtcacgtttaatcaggcagaaattgctttcattactatccatttacgtggagctaaacgaaaaaatcttaatgatacatcattaaataatcgttgtgaagaaaacaaaattaaagcgtttgttaacaaagtagaaatgatttccggtatgacatttgcagatttggatactttagtagatggactgacgctacaccttaatcctgcaatcaatcgtttgcaagctaatatcgagacctataatccgttaacagacatgattaagttcaaatatccaagactatttgaaaatgtaagattagctttaaatgattgttggcctgatttgatttttccagagagtgaaattgcttttatagttttacactttggtggctcgattaaaaaccaaggtaatcgatttttaaacatattagtcgtttgcagcagtggtatgggaactagtcgtctattatcaactcgtctagagcaagtttttagtgagattgagcgtattacacaagcatcagtcagcgatttgaagtcactagatttaagtcaatatgatggcattatttctactgtgaatttagacatcgactccccctatttaacggtaaacccattattaccagatagtgatatcagttatgtcgcacagtttttaaatacaaagtctacgttccaagagacgcatgataaatcatcaaacatgattgataaggatgatgttcatgttgaaacgaaagatgttgatggcaacacatcttttgaaaatgaacaaacttcatacttaacttcagttttcgaaaaacatttaagtgacgaaaaatcagaacaattattgcatcatatgcgttcgggtttaactttgcttgattcagtgaaaatagttagtaccgaagttaaacagtggcaaacatatatcgcagattatctatatcaatgcgatgtaataaacgatccaacgtcattcgctgaactactagagcaacgattgattgacaatccaggatggatattaagtccatatcctgttgcaataccacacctaagagacaatatgattaaacaccctatgattctaatcacagttttagaagaaccgttaacattgcctagtattcaaaatgacaatcaaacaattaaatatatgatttccatgtttatttctgacaatgattttatggcatcactggtaagtgacttgtccgaatttttaagtttgaaattagaatctattgatacttttatggaaaatccacaggaacttgaaacattattaagaaacaaatttttagaacgaattaaaaaacaatttatttaggagtgtacaaaatgagcgaattatttagtaatgacaatatctttttaaatgtaaatgttaacagccaaaatgaagcaattgaaaaagcaggtaaagccttagttgatagtggtgctgtaacagatgcttatattcaagcaatgaaagatcgtgagcaagtcgtatcaacatttatgggaaatggcttagcaattcctcatggcacagatgaagctaaaacaaatgtgattcactcaggtttaacattattacaaatccctgaaggcgttgactgggatggcgaagtagttaaagttgtcgtgggaattgctggtaaagatggcgaacatttagacttgttatctaaaattgcaattacatttagcgaagaagaaaatgtggatcgtatcgttcaagcaaaatctgcagaagaaattaaacaagtattcgaggaggcagatgcataatgaaagcagttcactttggtgctggtaacataggtcgtggtttcattggttatattcttgcagacaacaatgttaaagtaacatttgcagacgtcaatgaagaaatcattaatgctttagctcatgatcatcaatacgatgttattttagctgatgagtctaaaacaacgacgcgcgtgaataatgttgatgcaattaattcaatgcaaccttctgaagcgttgaaacaagcaattctagaagctgatattattacaacagctgttggtgttaacatactacctattattgctaaatcttttgcgcctttcttaaaagaaaaaacaaaccatgttaatattgttgcttgtgagaatgctattatggcaactgatacattgaaaaaagcagtacttgatattactggccctcttggtaacaatattcattttgctaactcagcagttgatagaattgtaccattacaaaagaatgaaaatatattagacgttatggttgagccattttacgaatgggttgttgaaaaagatgcatggtatggtccagaactaaaccatattaaatatgttgatgatttaacaccatatattgagcgtaaattattaactgtgaatacaggacatgcatatttagcgtatgctggtaaatttgcaggtaaagctacagttttagatgcagttgaagatagttcaattgaagctggcttacgccgtgttttagctgaaactagtcaatatattactaatgaatttgattttactgaagcggaacaagctgcttatgttgaaaaaataatagatcgtttcaacaattcttatttatctgatgaagtaacacgtgtcggacgaggtacattacgtaaaattggccctaaagatagaattataaaaccattaacatatctttataataaagatttagaacgcactggtttattaaatacagctgcattgttattgaagtatgatgatacagcagaccaagaaactgttgagaaaaataattacattaaagaacacggtttaaaagcgtttttaagtgaatatgctaaagttgacgatggcttagccgatgaaataattgaagcgtacaattcactttcataatttattgagctttgtttgaaacaagaagtttccaacgttattcgttaacaatcagtaataatgtagtagttcccttgaattaacaatattaaatttctgaacataaaaaatactcccttcaacatagacacttaacttgtgttatgtatgaaaggagtatttttgcgttaataatttgttttattttcgagccacagccacctattcaatggctattggtcattactaaaacaaattcatattaactgttagacttggttacttagtaaggaatatttccctatgaaataactagatgttcacattcttgaataaattttattcttcagtttgttggtctttcttagtgaatcttctaattaagaatgccatacctgcacctagagctaattcagcatatggtaaatcgtcattatgtgacataccagtatctggtaaagttttagcttgttgtttagctttattaacttttccttgttgagctgattttgtcttagcttggtggtcgtcagtgttagttacattaagcatatcttgattagcactattgcttccatttgaaactgtagctggagatgcattggcaccgtcgttttgcgtagctttattgtttgcagctgaaccaactgatttttgcgtatcattagtatctgctgttgccgtatcatctttttggctaacattagttgaagtcattttttcttttgcttcagaagatgcagatgttgatggtttattcgaaacttcagtatcagctttgcttggcgatttatctgcttcgttagatgcaacgttagtttcagacttaagttgtcctgcatcagtttgatttgtcgtactttcttctttatcttttgatgtattagaaggtacatttggttctgttatgtctgctgaaggcaatgtttcagttgttgattcaaccatactttgatttgttgaatcactaccatctttttctgccttagctttattttcagattttggttgtgcaaccttgtcattagttgattgagattcagcactattatttacttcagcattttgttttgaatcatttacagatgcattatctttgctatcagcagatgatgctgcttctgtgctcgcagttgttggagccgttgctgttgatcctgttggtgcattctcgtttgttgctgtagttgtactattgttatttgttgtgctttctgctggcgttgcattatcagtttctgttacaggtttatcagttgtgccgttattagttgattctacttctggtttactagttacatcgttatccattgtcggactgtttgttgatgcatctacactagaattgttattagcttgcggtttatcatttgcatcatcagttgctgatgttgctgttgtttcacctgttgccgcatcactattatttggtgttgtcggagaagcgtctgctttgccattagctgtcgtctcagatacgttaggttgtccagtattttctggtgttgcattagcatttgaatttgctgttgcatcattattatctataccattattagtatcattagcatctggatcattctgaggcacaatcgcttcaattgcaggtatcgttacattttgtaattcagcaacttctgcatttgtttgtgttttatctaatttatcagcaaatctgtcaaaatatctacctaaatccgtacgtgcaatttctttcgccgatgcatctgcatctgcatttttaattatttctatttgcttgttaaccacttctctgattgcttccaaagcatttttcttaacttcaggattaatacgttgtgctttaagttgttcaagcgcactatttttgacagtagcgatttctgcatttgtagtttgatcagaaatatcttcagttgcttttgataaaatgtcttctaaagcattcgtaaacgcttctttttcttcagttgtagcatcagcgttgacatttacacctgcttcaatctggtctagtgcagtttctaattcttcgatagctttttgtttttctgttgagtcgatttgaatgttatcaaatgcttcaagtccttgagctttcgctttttcaacttcagcagttgttgttgcatcagtaataccttgtttagcttgatctgtaatttgtttaatcattgctaatgcttcagttttttcttcagcagttaactggtcactttgatcaatagattctttcgtatcttctgctttaacttcaatagcttggttcgctttaggtttaacagtagcatctacttgaatagcatcaattgctgctttaccttgtgttaatgcatcatcaacgtcaccattatccacaccattattaatgctttctaatgcagtttgaacattttggtcaacttgcttaattgcttgttgcttttcatcttgtgttgcattagtgtcagctgaaatattatttttcttctgatctgcataagcatataaatctgttgtagctgattcttttttacctgttggaattgtgtaatcgttaatattatctaagtcattatgaatttgaacttcaatgtcatctttagaagtagcttgattaacattttgatccgcagtttgttttaattcagcaagtttttgtttcgcttcagcaatttcacttgaagtcgatgcgttagagttatccgcttcgtttactttagcattatatgcatcttcaattttagctaaagcatcttttttgtactcactaaatgttttaactgcattaattttagcttttccttctttaactgcattatcaacatattcatttgttgatgattgatcgacatttgttttcgcttgatttaattcagtatcaacttcttgttttgcatcattaatttcttgttgtgatgcatttggtgtttgttctatttgtgttttcttatcagctgcagcttgatctaattcttttttacctgctggtttcttaacaggatttgcatgaagttgttgaactttttgtactgctgtatctttagcagtagttacatcacctgtagtagttgctgcattaatattatttaaaccttcttcatatgctgctctaactggtccaatatcgttacctttttcttcattagtagtctcattattattaagtatttcagttattttattttgcatttcagttagcaattccgctcttgcattcgttttaacatctgttgatgcttgaattgggtcaattgcttgaattgcattatcttttgcagtgtttacatcatcgattgactgtgcattttcaatattttgattaccttgtgttaattgtgcgtctacttgttgatttgcttgttctttttcttcagtagtcgcatctgcagtttgtgcaataagcgctttttgttcgtttgcttttgttgctaattcatctttcgcaacatctttaattgttgtatctgcagtaataccttgaatatcagcaactgcttgatctttaatttgcgtaacatcattagttgtttgtgcatttaagatatcttgatacgctttttctttagcttttaaaactaaatcttttgctgcatttttctcttcagttgtagcaccagttgtattatcaattgcttgattttgagttgtcacagcttgatcaacatcatttttagcatttgatttaaccgctgttgctggttgcgtgctttgaattgaattctttccagcgtctttcgcctgatctacaccattatcatcagttgcagctgtaatattatttttcgcgtctgtaactgctgttgctaattgttgaatagctgcttctttttcttctgttgtagcgttctgatcattattgataacatttgtttgcgttgcttgtaattgatcaatttcatctttagccgcttgtttcttcacaacttttggtgttaccgcattaatcgctgcttctgcatttgctttagcttcatcaacttgtgcgttagtagttgctgctgaaatggcttgatttgctttaccattttcagtatttgcttcagcatcagctgcttgtttttcttcatctgttgcatctggcgtagcttgaatctcttgcaatttgttatttaaaattgctgtgatttcattacgtgcagttgcttttttattaactgttggtgttacttgatcaatactattttcacctgtcgttttcgcttggtctacatcattttgactattagcagcttcaatgttgctatttgcttgtgtcacagcattatctacgtccgcattagccgctgcaatttcttcagcagtaatgtcttgcgtttgagcgattgctgttttacgttcattcgctttcgtagcaattgcttctttcgcattatctttagttgttgttgctggctgaatcgcttcaattttagcaattgctgcttttttagccgcttcaacttccgcatttgtatgtgctgcatctattgcggcatcagctgttgttttttcagtttgaacttgttgtttagcagctgctttttcttcagttgttgagccgttatttccatcaattgctgtttcttgagcttgtactttatctgcaattgcttgttttgctgctggtttaacatttgcatcaggtgtaatggctgcgattgtagcttcatttgtagtttttgcattatccacatcattgtttgctgcagcattatctatatcagcgtttgcagtaactactgcttgatccactttgtctttcgctgcttgttgttcttcagtagtcgaatcattcattgcttcaattgctgttttacgttcacttgctttttgagcgatttccgcttttgcatccgatttcttagttgtggcagcttgaacttgattaattgcagcaatactattgtctttagctgttgttacatcactgtttgtatttgcagcatcaagatttgttcttgcttcttgctttttagtatctaattctgtatatgcagcttgtttttcttctgtagttgaagcattgctattttgaatttcttgtttacgtgtattatatgcgttttctacttccgtatcagctgcaggtttaacttttgcttgtgtttgaattgcattgattttatctaatacttttgattttgtatcagcaacttcctgttttgatttaacaacttggatgtcatgtaaaccttgcttttgagctgcatctactgctgcatcagcttctgctacttcttcatttgttgcatttgaaactgtagcattttgagcttttctagctgttgcagcttgtttaacttcattataggcatccatttttgtttgcgtagagtcagtaatattttcaatttttgagatttcttcgtttttaactctttctaaatcttgtgcagtcgttgtcgcttcaattgctttaacaccagaaactttagctgcattaatacgttcaatagcttccgctacttcttcatttgttgtatcaggatttaaaggtgcttgatcaatttgtgcttgaacaacttcgtcaaattcttcaagagctgctgctttagctgttgtagcaggtgtagtttgattaatatcattgattgcttttgttttaatggcttctacttgtgcatttgttgttgctgcatcaatatctttaattgcctttgtttcaattttaccaattttatcatttgctacatctttttcatcttgtaatgatgcatttgactttttaatttgttgtttacgagttgtaactgcttggataatatcttgtttcgcttgaggtttaactgttggtgtaatcacatcttgttctaacactgcgataccattatctttttcagttgtgacaccttgtgctgtagtttgtttattaatttctgcgattgcattatttttatcattgttaattttagttacaagtgctgcaacttcatcttgcgtaacttttttactttgttgtgctgctgtaaccttttcttgagctttagtatctaattcagcaattgctgcttgattatcaattaatgcagcttgtaatttagttactaaaccatcaatatccgcttgagatgcacgatttgcagttttaacatgattcgcatcttcatttaaaatagtatctgcttgttgtttaagtttattgtattctgcaattgatgctgttgtgtaatgactattatcaacttgtgagtttacttgttgttgcaacgcatctttgttcatttcaaccgctactgaaaatggatctgcagttagtgtaacttctggttgcgcattattaattacaacatctgaagcagtacgatatgttaatttttcattaaaatcaatatttttaggtgtatcgatattcgcaacattaactttatatgataattttaaagatttatctgggaataaaacttctttagtgtgtgtaccacgtgccgttgtcacaccttggcttgtaaatgtaactttatttgcattttgatcataattaacagtcatatttttcaatactgtactgtcttcattaccattagggaatgttgtagttaatgaattattaacgtaagttacaccttgtggtaatgttacttcatatttaaattgatctgcttttaatgaagcaccaaaattaccattgttaccgatttcagtattaatagtatattctttattgttagttgctttcggtgctaaatctctatttttgacatataaatgtgatcctgagaatagacctacattatcaatgaatgaatagtatttataaccatctttatttgttgtaattcttgaagcatcagcaactgctgtattgtcaggaataaattgtaaatctaaacgatcagcatcagttggtactttaaataaatgtgcagtaccagtcttagcaacatttacagttgctaattcagtatttttcttagcatctttaataactaaatttgttgcaccttgcttactattcgtttgcatagtagtaaagttaataattaattctgaatctggttttacatttacagtttttgaaataccgttaaagttaccatgatctgtagaatcatttgcattcacacgacctaatgcagccacgtttcctttagcttgatagttttgagggttattcttatcaaacatatcgcttcgtcttaattctgagttaacgaaaccaatcttaccgttgttaattaatgaataaccatttactttatctgtaacagttacagttggatcttgtctattctcatctgttgatatggcaggatcatcaaatgttaatgtcgtattaatactgccttcaccagtattgctagcatttggatcttgagtttgtgcgtttgctgctacaggtgctgctggttgcgctgctgctggagcattcgctggctgtgtttgatttgccggtgttgcattattattaggtgttgcttggttatttccttgacctgcttggtttgccggtgttgcttgatttccaggttgtgcttgtgcagcgttattcggatcagcttgattaccttgtccagctggttgtgtatttggttgtgctgctcctcctgctggattagcctgtccaccttggtttgctggttgtactgctggttgtccttggttggcaggtgcagctggctgtgctgtaggattagcttgagcaccagcatttgcgttaggctgtgtattggcatcagctggttgtgctggttgattttgtgcaggctgattttgctctgctgcagacgctgttgtcgggttagtagatataaaagtaacagtggcaattaaagctgaaaaaataccgacattaaattttctgatactaaatttttgttgtctgaataaattcattaagtcatcctcctggttgattattctcgctgttaaatgatttcacttaatcaactgttaagataagtagtagcatctgcgttaaaaacacaaaacaactctatctaattaaaattaattttatcatcattatatattgagtaccagtgtattttatattacatattgattactttgtttttattttgtttatatcattttacgtttgtactataaattatttctacaaacacaaaaaaccgatgcatacgcatcggctcatttgtaatacagtatttatttatctaatcccattttatcttgaaccacatcagctatttgttgtgcaaatctttcagcatcttcatcagttgctgcttcaaccatgacacgaactaatggttctgttccagaaggtcttactaaaattcgaccttctccattcatttctacttctactttagtcataacttctttaacgtcaacattttcttcaacacgatatttatctgttacgcgtacgttaattaatgattgtggatattttttcatttgtccagctaattcacttagtgatttaccagtcatttttattacagaagctaattgaataccagttaataaaccatcaccagttgtattgtaatccatcataacgatatgtccagattgttctccacctaagttataattaccgcgacgcatttcttctactacatatctgtcgccaactttagttttattagatttaattccttcttgttcaagcgctttgtaaaaacctaaattactcataacagtagaaacaatcatgtcattattcaattcttgatttttatgcatttcttgaccaataataaacataatttggtcaccgtcaacgatttgaccattctcatctactgctatgattctgtctccatcgccgtcaaatgctaacccaaaatcactttcagtttcaactactttttcagctaatttttcaggatgtgtagagccacatttctcattgatattatatccatcaggactacatccaattgtttcagtatctgcttctaagtcaccaaataagaatggcgctagtgatgatgttgaaccatttgcaccatctaaagcaattttcaaaccttcaaagttaacatctactgttgattttaaatagctcaaatatttttgtgccccttcaaagtaatctgaataatgtacaatatcattgccaactggtcttggtaattctgggttttcttgatccaataatgcttcaatttcattttcttgttcatctgatagtttaaaaccatctgatccaaagaatttaataccattatctgcaactggattatgagaggctgaaatcattacacctaactctgcacccatatcgcgtgttaaatatgcaacacctggtgttgaaataatacctaatcgcatcacttctgcaccaattgaaatcaaaccagctattaatgctgattctaacatttcacctgaaactctagtatcgcgacctacaagtacacgtgggtgtttttcacctttattatgtgctagaacatagccaccgtatcttcctaatttaaatgccaattcaggtgttagttcttggtttgcgacacctcttactccgtctgtaccaaaatattttcccattgtttactctcctttaatttagctatttattttacatttatataagccttcgtttcacttggttgtgctttagtgacatgttctggtaaattgatttttacagtcttttcagttgattctgaaataccatctaaatctacttctgcatcaacttcgcttatattttgtaagtcatctcgactaccgaagatttcaatttctttatcttctaaatcaatcgaacttaactctttatcatctgctaaactacctttctgtttaacatttactttaacctttttgctaaaaggctctactttaacttgtaaattcacttcattaggttgaatcgatacatttaatttattcagttttttatcaaaagccgttacttctgcgacatcttttgtgtcaccattaatctttttattagttttaaaagtggcttttaaataagcgatatcattcaattgttcttctccacctgttactttaactgtttgtggtgaaacttcttgctttgtaattttataaagtggatcaatatcactctgacttacatcaggttgaactgtcatctttttagttactttgttttcaagcgtaatatttgctaatttaggttttacagaataatgaatgtcatcagctaaccctttaacttgatacttctcttgatattttccagctttagcatttgataaatcaatcactactcttaaatcttctggattttcaatttttattatctttgattgtggtcctgaaatagtcacattaactgtttcaggcgcttttgttaaatgcaaatctttagtgttataaagaatttcaacgggtacatcttgaatcgttttactagacttttgaccaagattaccagtgttaaagatatttccaaaaacattgttaacagataaaaagaaaaacaatgccaaaagaaaggcaataaatctcaagccccatttactttctagcatattatttcacacctttcttttgaaagcgtgtgccaaaccaatgttcagcaagcaactcttcaaaaatttcgtttgaaatgtctcgtcgtaattttccatcaaatgttaccgaaatatcaccagtttcttcagatacaataacggtaaatgcatcagatacttctgaaataccaaccgcagctctatgtcttgtacccaaacttttagatatcttaggactatcagacaatggcaaataacttgctgctgctgcaatcttcgtgccttgaataatcattgcaccatcatgtaaaggtgtgttaggtataaagacattaattaaaagttcttgcgaaatatttgaatccattgcaatacctgtttcaatataatcttgaagacctgtttctttttcaaagacaattaatgcacctatacgtcttttagccatatattgcacagcctttgaaaccgattgaatcaatttctcttcatctttactatacgtattagaagtatagcgttttaaaaagctacctctaccaagttgttctaacgcacgtctaatttctggttggaatattactattaaagctaataccccccattgaataacgatatcgaataatttagatgttgcagtcaagttcaatatcatacttatctgctgaccaataacaattactaatatccctttaagtaattgtatcgctttagttcccttaaagacagtgatgagaagataaagtacataccaaactatcagtaaatcaaggatactcgttacaatttttaacgtactgaggttttgaaaaaagttggaaaaatccataacatctcctccgggtaatatttttccataatacccattataccaatcatttacatcactgtcatacgaacatatatttaaatagaaaaaatttattttaaagattataactactcttaatcattttagtgaattaaaaaaagtagtgcaaaaagcaaaatatactttatacactacaaatcatttatttataataaagtttcaccaaaaaatgttccaactaatgaaaccgcttgttcagcagtatgattattactgtcaatcaatggatttacttcaactaaatccattgaggaaattaaatgtgattgatgcagtaattccaatgcaaaatggctttctctataactaagaccacccaaaactctagtaccagtgcctggcgtttcaagcggatctaaagcatcaacatctaaagataaatgaacgccatcaacattgcgtgacttcaaatattctattgtattttcaattacttcctttatccccaatttatcaatatctgacatagtaaatgttttaatattatgatctttgataaattgtctttcacctttatctaaatctctcataccaattagtacgatgttttctggcttgattacattactatttaattctaaaagttctttgggaccttcgcctgtcaaaatccttagaggcataccatgaatatttccacttggtgactcttcaggtatatttaaatcaccatgtgcatcataccaaataacacctaaattattataatgtttacttattgctgatactgaacctaccgcaatagaatgatctccaccaagaactagaggaaatctgttattttcaattgatgctgaaacctctttatttaatttttgattaacatctataatttcatcataatttcttaatcctttttgttcactatgaaatttttcaatgttcacagcaggtaccttaatatcccccttgtcatatacatcaaggtctaattgctttaatcttgaaattaatccagcatatctaattgctgttggtcctaaatcaacacctaattttctttgtccaaatgttgatggtgcacctataatatcaattgcttttgtctttgtcataagcgtccccctttgctctatgtaattaaagaataatgtatgcgcttaccattatcaagcaatagctacacatataatctgtttatcttattacttcataaaaaaaggttcttcatcttttatggtgggaaggtaaaacttcctgctttttttaatacacaaaaagcgcaattgcctctataatttaaagtgaccaaacccaaactaaaggagacaagtgcgcctatgtgtaatgataccttagaattactaagaataaaagatgaaaatataaaatatataaaccaagaaattgacgtcattatcaaaggaaaaaaagcaacagtggttaatgctgtactaacgtataagccttcggcctgttattgttgtggagttaaaaatgaaggacaaattcataaacatggtaagcgtgtttctcgtattactttacttaaaactcaagggtataacacatacctcaacttagctaaacaacgttttaaatgcttagaatgcaatggcacttttactgctaaaacgtcaattgttgatgagtcgtgttttatctcaagatgtgttactcaaaaagttatagaagaagctactaaagttaaaacagagattgatactgcagaagataactgtatctctccatctactgtaagtcgtattagaactaaagcggctaattcattacgaattaaaccctttaattgtttgccagaacacatcgctatggatgaatttaaaagcgttaaaaatgtaactggatcaatgagtttcatttttatagataatgatactcatgatgttatagatattttagaaaatagaactacaagattcttgcgtgcctatttcgagcgattcgatttaaaaaatcgacaacaagttaagacggttactattgacatgtatgaaccctatgtccgattatttcgcgacctatttcctaatgcagctattatttttgacagattccatatcgttcaacatttaaatagagaacttaataagtatcgtgtacaagttatgaatgaataccgtaataaaaaaggacctgattatacaatttttaagaataactggaaagtcctattgatggatactagtaaaaccatatttagtaaatacagatggaataaatcttttaaggcttataaacgctcatctgacattgtagaattcatgctttcaaaagacgatatactacgacactcctacgaacttgtccaaggattacgaaaagacctaaggttatgtaattggcctaaatttattaatcgtttaaattcagttagtaaaaagtctgtgagtaagggtgtatggaaagtggttaaatattatagaaaacatcaaaggatgttaagaaatacaatttattacccagcatttaataatggtgctatagaaggaattaataataagataaaattaatcaagtgaatttcttttggttacagaaatttcaacaactttaaagcacgtataatgatgattttcagcttgtacaaaggagaaaaaagaagacaaccaagcccaataatggactggccgcctaataataaaagctctaaaagttgtattttaaaaatagttctttaaattatatacccaccacatttggtggagaacctaaaaaaaagcacttcccaaaaatggaaagtgcaagtagtgagccatagaggattcgaacctctgaccctctgattaaaagtcagatgctctaccaactgagctaatggctctaatggctgggctagctggattcgaaccaacgagtgacggagtcaaagtccgttgccttaccgcttggctatagcccaatatatagatggtggaggggggcagattcgaactgccgaacccgaaggagcggatttacagtccgccgcgtttagccacttcgctacccctccagcttattcatataatttaataatcaaaatggtggagaatgacgggttcgaaccgccgaccctctgcttgtaaggcagatgctctcccagctgagctaattctccaaaataatgactcctacgggactcgaacccgtgttaccgccgtgaaagggcggtgtcttaaccgcttgaccaaggagccatggctccacaggtaggactcgaacctacgaccgatcggttaacagccgatagctctaccactgagctactgtggattaatattatgcctggcaacgttctactctagcggaacgtaagttcgactaccatcgacgctaaggagcttaacttctgtgttcggcatgggaacaggtgtgacctccttgctatagtcaccagacatatgaatgtaatttatacattcaaaactagatagtaagtaaaagtgattttgcttcgcaaaacatttattttgattaagtcttcgatcgattagtattcgtcagctccacatgtcaccatgcttccacctcgaacctattaacctcatcatctttgagggatcttataaccgaagttgggaaatctcatcttgaggggggcttcatgcttagatgctttcagcacttatcccgtccacacatagctacccagctatgccgttggcacgacaactggtacaccagaggtatgtccatcccggtcctctcgtactaaggacagctcctctcaaatttcctacgcccacgacggatagggaccgaactgtctcacgacgttctgaacccagctcgcgtaccgctttaatgggcgaacagcccaacccttgggaccgactacagccccaggatgcgatgagccgacatcgaggtgccaaacctccccgtcgatgtgaactcttgggggagataagcctgttatccccggggtagcttttatccgttgagcgatggcccttccatgcggaaccaccggatcactaagtccgtctttcgaccctgctcgacttgtaggtctcgcagtcaagctcccttatgcctttacactctatgaatgatttccaaccattctgagggaacctttgagcgcctccgttaccttttaggaggcgaccgccccagtcaaactgcccgcctgacactgtctcccaccacgataagtggtgcgggttagaaagccaacacagctagggtagtatcccaccagcgcctccacgtaagctagcgctcacgtttcaaaggctcctacctatcctgtacaagctgtgccgaatttcaatatcaggctacagtaaagctccacggggtctttccgtcctgtcgcgggtaacctgcatcttcacaggtactatgatttcaccgagtctctcgttgagacagtgcccaaatcgttacgcctttcgtgcgggtcggaacttacccgacaaggaatttcgctaccttaggaccgttatagttacggccgccgtttactggggcttcgattcgtagcttcgcagaagctaaccactcctcttaaccttccagcaccgggcaggcgtcagcccctatacatcaccttacggtttagcagagacctgtgtttttgataaacagtcgcttgggcctattcactgcggctcttctgggcgttaaccctaaagagcaccccttctcccgaagttacggggtcattttgccgagttccttaacgagagttcgctcgctcaccttagaattctcatcttgactacctgtgtcggtttgcggtacgggcacctattttctatctagaggcttttctcggcagtgtgaaatcaacgactcgaagacacaatgtcttctccccatcacagctcagccttaacgagtaccggatttgcctaatactcagccttactgcttagacgtgcaatccaatcgcacgcttcgcctatcctactgcgtccccccatcgattaaaacgattataggtggtacaggaatatcaacctgttatccatcgcctacgcctgtcggcctcagcttaggacccgactaacccagagcggacgagccttcctctggaaaccttagtcaatcggtggacgggattctcacccgtctttcgctactcacaccggcattctcacttctaagcgctccacatgtccttacgatcatgcttcaacgcccttagaacgctctcctaccattgtccaaaggacaatccacagcttcggtaatatgtttagccccggtacattttcggcgcagtgtcactcgactagtgagctattacgcactctttaaatgatggctgcttctaagccaacatcctagttgtctgggcaacgccacatccttttccacttaacatatatttttgggaccttagctggtggtctgggctgtttccctttcgaacacggaccttatcacccatgttctgactcccaagttaaattaattggcattcggagtttgtctgaattcggtaacccgagaggggcccctcgtccaaacagtgctctacctccaataatcatcacttgaggctagccctaaagctatttcggagagaaccagctatctccaggttcgattgaaatttctccgctaccctcagttcatccgctcacttttcaacgtaagtcggttcggtcctccattcagtgttacctgaacttcaacctgaccaagggtagatcacctggtttcgggtctacgaccaaatactaaacgccctattcagactcgctttcgctacggctccacatttactgcttaaccttgcatcaaatcgtaactcgccggttcattctacaaaaggcacgccatcacccattaacgggctctgactacttgtaagcacacggtttcaggttctatttcactccccttccggggtgcttttcacctttccctcacggtactggttcactatcggtcactagagagtatttagccttaggagatggtcctcccagattccgacggaatttcacgtgctccgtcgtactcaggatccactcaagagagacaacattttcgactacaggattattaccttctttgattcatctttccagatgattcgtctaatgtcgtcctttgtaactccgtatagagtgtcctacaaccccaacaagcaagcttgttggtttgggctcttcccgtttcgctcgccgctactaagggaatcgaattttctttctcttcctccgggtactaagatgtttcagttctccgggtgtgccttctgatatgctatgtattcacatatcgataacatgacataactcatgctgggtttccccattcggaaatctctggatcaaagcttacttacagctccccaaagcatatcgtcgttagtaacgtccttcatcggcttctagtgccaaggcatccaccgtgcgcccttaataacttaatctatgtttccaccatttttataagtcaaacgttaacatgaagttacgttcttttataaaaagatttaaacgcgttattaatcttgtgagtgttctttcgaacactagcgattatttcttatgaattcaagcttatttaaaactctttattcactcggttttgcttggtaaaatctatattttacttacttatctagtttctaatgtacaatttctttttagttcaagcgctcgcatactgctttattttcataagcaatatcacttttaccaaaaatattgaatgttaaataaacattcaaaactgaatacaatatgtcacgttattccgtatcttctgaagaagatgttccgaatatatccttagaaaggaggtgatccagccgcaccttccgatacggctaccttgttacgacttcaccccaatcatttgtcccaccttcgacggctagctcctaaaaggttactccaccggcttcgggtgttacaaactctcgtggtgtgacgggcggtgtgtacaagacccgggaacgtattcaccgtagcatgctgatctacgattactagcgattccagcttcatgtagtcgagttgcagactacaatccgaactgagaacaactttatgggatttgcttgacctcgcggtttcgctgccctttgtattgtccattgtagcacgtgtgtagcccaaatcataaggggcatgatgatttgacgtcatccccaccttcctccggtttgtcaccggcagtcaacttagagtgcccaacttaatgatggcaactaagcttaagggttgcgctcgttgcgggacttaacccaacatctcacgacacgagctgacgacaaccatgcaccacctgtcactttgtcccccgaaggggaaggctctatctctagagttgtcaaaggatgtcaagatttggtaaggttcttcgcgttgcttcgaattaaaccacatgctccaccgcttgtgcgggtccccgtcaattcctttgagtttcaaccttgcggtcgtactccccaggcggagtgcttaatgcgttagctgcagcactaaggggcggaaaccccctaacacttagcactcatcgtttacggcgtggactaccagggtatctaatcctgtttgatccccacgctttcgcacatcagcgtcagttacagaccaggaagtcgccttcgccactggtgttcctccatatctctgcgcatttcaccgctacacatggaattccactttcctcttctgcactcaagttttccagtttccaatgaccctccacggttgagccgtgggctttcacatcagacttaaaaaaccgcctacgcgcgctttacgcccaataattccggataacgcttgccacctacgtattaccgcggctgctggcacgtagttagccgtggctttctgattaggtaccgtcaagatgtgcacagttacttacacatatgttcttccctaataacagagttttacgatccgaagaccttcatcactcacgcggcgttgctccgtcaggctttcgcccattgcggaagattccctactgctgcctcccgtaggagtctggaccgtgtctcagttccagtgtggccgatcaccctctcaggtcggctatgcatcgttgccttggtaagccgttaccttaccaactagctaatgcagcgcggatccatctataagtgacagcaagaccgtctttcacttttgaaccatgcggttcaaaatattatccggtattagctccggtttcccgaagttatcccagtcttataggtaggttatccacgtgttactcacccgtccgccgctaacatcagagaagcaagcttctcgtccgttcgctcgacttgcatgtattaggcacgccgccagcgttcatcctgagccaggatcaaactctccataaaaattatgatgtttgattagctcataaatactaaataatgtttgtaactaatagttacgtttttggaattaacgttgacatattgtcattcagttttcaatgttcattaatgttcaatctcttttattctacttcatttatttcttgaagtcaataactttttgaacgattactttatttattctatattgtttttatagttatttcaatggtaagttttacacttttgaaattcttctttaaaaacaactgcgtcgtttttgacgactttatcatattatcaactttggaatttaaagtcaataacttttttaaaaactttttgtgttcacaacccgcttctttttcaacgcgtttattgcttaacacaagaacttattttaccagcattccaaaacaaatcaacataaaaacgtacaaaataaaagtaattttgtacgtttagcatatattatacctatttatttgtagcagctataactttttgtgcaatcgagctataaattttacctagacgatcatctgattgatatattgacggtgcaaaatcttttggattccaagatggttgctctaaaggtaattccccaagtaattgagtattaagttcatcagctaacttagtaccgccacctttgccaaagacatattctttattacccgtctctttactttcaaaataactcatgttttcaattacgccaagaatagaatgatccgtatgttttgccatcgcacctgcgcgagctgcaacaaatgctgctgtaggatgaggtgtcgttacaataatttccttacttgaaggtaacatcgtatgaacatctaaagctacatctcctgttccaggtggaagatcgagtattaaatattcaatgtctccccatttaacttctgtaaagaaattcgtcaacattttacctaacattggccctctccatataactggcgcattttcttccacaaaaaaggccattgatataactttaacgccatgacgttcaactggaattacttccttccctttaattccaggcttttcatcaatacccatcatatctggtacactaaatccatatatatcggcatctactaatccgacttttttcccttcacgagctaaggcaacggctaaatttactgcaacagtagatttaccgacaccacctttaccggaggctattgcaataaattcgactggattattttgagataataggccttctatcgttttaggtttattttcttcttttggtttaaattgatttactttttcttccggcaatgtttcaaatcgtataccgaccgttttcgcaccgttttcttttaatgcattaacaacagccatctgtaaatctaattgcggtgcaccacctaattgtgccattgctaatttaacactcacatgttctttttcttccttaatagaaacttcaacaataccttctgtttcttttaaaggcacatctataataggatctttaatttctcctaccaattctttcacttgatctaccgttaacaaagcaaatcccccttaatcattttaagacatctacatcatagcaaataacaatttttgcttagtctatcactaaaagtataaaactttttattaaataaaaaaagcagttagcctattattttaaatagaccaactactataattattttaaaatttccttctattactttctatttctttaggttctcttataaaaagtgctatcacataagctgccataacaagcacagctacaaaagcaaatgagatatccacccctatagcaatggattgctgtttaatttcagttgcagttaaatgcgatggcgatgtagataaaaatatttttgccccaaaactcattaatgtaaccattaaagctgtgcctagtgaaccagccattacacgaccaaagttcataatagccgtgccatgtgagatttcttcatttctcaaagaattaattcctgtagtatttatcggcatcatgagtaaagaaactgaaaacattctaattgcatatacgactattaaatacgtataagatgtgtctgtatgcaagaaacacaacataattgtagtaattgttaaaattgtaaaaccagtataaatcaatggtctaggaccatacttatcataaaatttacctgtaaaaactgacataataccatttattattgcaccaggcatgataacaagtcctgataacaaggcagataaagataaactgttttgaacatatagcggtataagcagcgcaggtccaaccattgacatcattataatcattgaactaatcgtacataatgcaaatgttctatttttaaaaacccttaaatttaaaagtgcattagtaatattaaattgtctacgtataaataaatagataataaccatacttaatatcaacgcacctattactattggacttgtaaatcctaaatctcctgcactactaaatgcgtatagcattaacccgaacccaatagttgaatacattactgaacgcttatctaatttcgtatatttcacttcattgtaactcgagattgaaaccaaaccgaaaacaaaggcaagtatagcaattcctacaattataataaatggaactcgccaactcgcttgatcaataattaatcctgtaactgtaggtcctattgctggtgcaaattgaattactaaacctgctagtcccattgcaaaacctcgatgttctttactgaacaatgtaaataacgtaaattgcattaagggcataagtacgcctgcacccatcgcttgaattacacgagctaacattaaaactccaaaattcggagctaaggctgcaacaatagaacctaataaaaatgtccccatcgccgctaagtataaaggtctagttttaattctatccattagatatgccgtcagaggtatcatgacgccattaacaagcataaacccagtaactagccattgcgatgtactttcattgatatttaattctctcattatactaggtaacgctgtatttaataatgtttgatttaaaatagctacaaacgcactaatcaacataacagcaactatgaagtttcgtctccgggttgttaattcaactttagccatcataattcctcctttttaaaacagatatacacttgtccctttaatacgtatagccatgaacataatgggagtagtactcaaataataaagaagcactacataataaatcattattggttcttacacattaggcacagctaatgtgtacttaaaaactaacaatataacattgtagggcctaataatttattttatgtctcagactcatacaatggttatttaacttatttaccacaaattgagcactaagactcactattatcgattcttctattgaacaaaaagaagttggaacacatatgtgccctcaacttcagatatctattttctattatttaaatttttactttcagggtaaaattgaagcttacaaacatataagaaccctataataaccatgatgacccaaaaatcgatattgatatacacatagttcagatgaataataaaataaaataacgttgttgcaactgtgtaagaaatcaaatgaaaagtcgcgcctctaaaatatgcattttcaggcaacatttttctaaaataatccattaaatgctcgactgcaaatatgatgaagtacccaaagattatataactgccataatataataggttatcgtacatacttctattatatgtaaagtcacccaacctaaaataaataagtattctacttaatccatataaaccaaaccctagaaatgttaaaaaaatcgcaccagaaagtacaaaaataaagagaacaatcattgtagttaacaagttataaaacttatgtttaagataattcacaatcattggcctccttattaataaaatattgaacgatttatctagtatctaggaaatttattatttcttactttaattacactacatcaattttaatcataattctattcttttgattgagatgactgttctttaaaaaatacgacccataaaacaataagcccaatgctaattacagcaacagcacttaacacattgtgtaagtttggaccaaagattcctgattgtatcgcataaagatatcccattattgttgaacctattgatgccccaagatttttagttaatccataaaatgacatcattttcttcatttgtaatgggctagtttcctcttggacaatcacactatctttcgtataaatatatccaaaacttaatcctgccaaaattaacacaaatgctataagtaccggcaatttaataccaaatgaaatgataatactacttactagtagcaatgtaaatgatagtaagtaaataactttccttgatagttttgcttcaattcgatgtaaattaaaattcaatgtaatccaagctacagataaaggaaaaataaccaatccactttgcaatggagataatcctagttgttcttgaaggtagactggaatatataaattgaatcccattaaacaaatagctgttagaaggtcagttataaaaactaaagtaatcgaacgattaaattcaaccacaggtaaaaatggtgaagaaacatgtttttctactttaaataaacacattgccacaacgatagctaagataaaactcaagaaatttaaaagtaacagctgttggtttaataaagcaaacataatcaatccaataaatacataaaatagcgtgagccctttagtatcaaattttgatttagcaactgtttcttcctctggaaaatgaaatgtccatataactaatataatggcaatgatcgcaatcggtatatttatgtagaataaccaatgccatgttgcaaattctaatataccaccacctagaagtggcccaatgatactcgaaataccccaaacactgccaactatgcccataattttatatcgtaacggaatttcaaatgctaactttggaacaatttgcgataatgacatcaatacacctgatccaaaaccttgtatcacgcgtgatataattagcatagtaaaattagtacttaaaccacacataaaactacctatactaaataaaagtaatcctgcaattgccacataaataattttaaatctcgaaagtaattcgcccactataggattggcaattactaatgcgataaaatacgctgtgaaaattaatgaaattaaatttcctgcatttaaatcttgtttaattgtaggtaatgcaagcgaaataatagatgattcaatcgctgacataaacataattaatattaaagctataacagttatgattgactttaatcgcatgaaatacctccttctatatatttatttataagattttatttacaaataattggttttcatatgtataaacacttttgactttcaaatcttaacgataattctattacaatacaatcccctattagaatgatttatgtaataaaaaaagcggagtttcccccagcttttctaaacgactacataaaatataagattgcaattaaatgcaatagtgatgctattacaataaaaatatgccaaatcatatgaaaatatggtctattcttttgtgcataaaaccatgcaccaattgtataagacacaccacctaagaaaatgaataatatgaatatccatgatgtgcgaataaaaataattggtaacaagataatacctacccagcccatcactaaatagacaattaagcttaacttttggttaactttgacagctatggatttatataaaatcccccaaagtgtcgttccccataataaaataaatactgtccaacctatccaaccacctacaactgttaacaaaataggcgtatatgtaccagaaattgctacgtaaatcatactgtgatcgataatccttaaaatatatttatgaggtgtttcattttgcatagaatgataaatagtagatgaaataaacatcataaagatagaaataacataaatagacatactcacagacgcaagcgtaccatgtgcaatataactgtgcacagccgcatagggtaacactaataatgttaacaaagctgcaacaccatgagatgccgcattaccaatttcttctccaaatgataaagggatgatatccttaaatgtttctacgattgtgtcattactttttttagttgatttggacatcatagtcaccgcctatcattaaattaaacccattctacgtaaatcttctgttgcagttgcaacactatctttaccttctttatttttaagaggtgaaaattcttcttctctaggaacttgtaacgtgacaaaactagttccataagtaaatatgtcaaaatagaacaattcgaattttaaagttggttgttcaataacaccaaagttctcatctaattgcttcaaattcttaatagctaaatgataaggtaactcacgatttacagcgtttaaaataaaaccaagtttaaatgcatgaataccgatattagcattgttaaattgatttgcaacttctggatctaattctgaatactccagtactgtatctttacaatcgacattaactaaacgtccaacactttctcctggttttggttgaatcgttttagaagtaatatcgtaatcatgttctaccgtaaatcctgcaaatagtggatccaacactcttactaaaacattgtcgatattattcaagaaaatatacttaacgccattattagacatttcttctaagtatcctgccttgtctaaagatttaaacacgccaccattaccattcggcgtttccataatacgaccctgttgatttaaaattaacttcccttcttcactaagcgccacaatattatcttgtttaaagaaatggattgcttcttgatcatatccaaaataactatgtgcttcgaaataagctaaagtttcttcatgattgatatcacttgtcataatataccattgaatcgtatgtccagattgatgattcaatgtttttaattggttagcttgaagttcaaataaacttacaccttcaatttcaaacgaacctttagggcccttgtaaccaagtcttgttccttgaccacctgccatcaaaagtactgcaaattgtccttctttaatagcttgaagtccttgttcctctaaacgcttaatctcatcatcactcatttgtgatttaatatcatatttcacttcagaaactgcagatacatcatctattgttttcttattgatgtataaatcgttatataatttggcaataaaatctaaatctaatgacgctaccttctcttcaagtgcttctttttcattgttactcattattttttcatattcacacaaatgatcttgtttatatttagctaattgatttttatctagcattttatgcctcctgctgagtttgtaacctttaataatttattttctataaaaacttagtattccagttgcttattatatcattgatgaaaggctgaaataaaacataaactgttccgaccattaacgctgtagctaaagataagtctacaagtccacctgttttaaattgaatcggtgtcttcacattaaacggtaacggataaaataatttcacgccttttggtgttatcatatctagtataacatgtgacactaatccaattataattgctgccatataataattaggcgtctgaataatttgcaataaaaatgctatgattgcgataaataatattgaatgcgtaaaggttcgatgtccaaagatcaatctcacaaaaaaactaattaccttaaaccttctgccaatcttactttgagtgtgacatatatcgggtaataagctagctagagttgctagaatgataaccgtaaccgacgaaaaaatatccgtttgaaaatattgtgttgttagcgctccaacgagcatgccacatgaagcatgtgttttacctgtcatatttgttctcctttaatactcacattttaccacatccctaacaaaaacacgaacatattttcgggttaaaattcattagtatgacacaatttaaaaaagtatcacataactcttgaaaacgattacaaaatcgtttatgatgtatttacaaaatatttaaaggatgtgtttgaataatggcaatgacagtaaaaaaggataataatgaagtgcgtattcaatggagagttgctgatatcaaaattcctacaagtgaaattaaaaatattacacaagaccaagatattcatgcagttcctaaattagacagcaaagatgtatctagaatcggctcaacgtttggtaaaacgaatcgcgttattatcgatactgaagaccacgaatacattatttatactcaaaatgatcaaaaagtttacaatgaattaactaaataaattgtataaaaaaatcattcatggtgagggcttcatgaatgatttttttaattgattcaacacccagcataaacaaatacaaaaggacaactgttcccataattttaacagttgtcctttttcacatatatttataacaaaagatgtgccatcaaagaaataattggtagtgtaatgattgttctaatcaagaaaatcataaacaatttgccgatgcttacaggaatcttcgaaccaagtatgacgccacctacttcagacaagtatattaactgcgatatactaagtgccccaataacaaaacgagttatatcattttgtacaccttcaattaatatagaaggtaaaaacatatcggcaaaaccgataataatcgtttgagaagcctgtgccgcttcaggtatttgcattaactctaaaaatggaacaaaaggtttacccaatatgacaaaaaagggcgtgtagttcgcaataatggtagcaatagtaccaatactcattactacaggcaaaataacaaaccacatatcaatgactgtttttaatcctgacttaaaaaagtcaataacgcccggtgctttaatacctacttctgttgcagtatcaaagccatgtctcaatgccgtctttccttctggcaatgcctcagtacgcgcactttcaggtacctccttagcatactcatcaggaattttatttaaaggccaaattcttggcataatgactgctgcaacgaggcaggatactatcactgataaatagaaagcaaaaaattgattttgcatgtgcactgtttcagcaactacaattgcaaaggtgatagaaactacactaaatgtcgttgaaataactgttgcctcacgacgagaataatatccttcaccatattgtctacttgtaattaagacaccaacagttccgtctccaataaatgatgctaaattatctaccgtcgaacgtcctggcaatgtaaataaaggtctcataaccggtctaaaaataggacccaacatctctaacaaaccgtattccattaatagcggtaaaaatagagctgcaaataagaatactgccactaatgttggcaataaacttgagaacaataatccacccgtttcatctgagtaaataacctttgaaccaattcgtaaaaatgtcatccatgcaaaaacaactgctaatattcgtaaaattaaccaaccaattctaacgttaaaagcattgttcattagcccgtcaggtttcaatttatcttttaaaatagttgaacaaatcagagttatgatacccgataaagtaattatcgtcacaattaaaaatggcattacgccacctaatacatctttaagcacgcctgctaaaaatgccacgggcaacgttgtttgcttctgtccatcttgttcgactggaattggtactaaaaataataagataccaattaaagacatcgtaataaacttaagtctcccaataactatctctttccttgaaaagctatccataaaatcaatccatttctctatgtattcgttttaagtatatacagaattctattcagttaacaaacatattccttatcattctatctttcaaaatgtttatgtatgcaaaataatgaataattacagttattaaatatacgctatttcttgtaatttttcaagatgaattcaaaaaaggttaagtacaattactgatttcgtacttaaccttttttaaactctaatcatatgttagttatttcattcttcgtaataatattaagaagtatggtgcaccgataattgcaatgataaccccaacaggaatatccagtggcggatgaatgccacgggctaaaccatctccaaatgttaacaatatagcaccaattaaccccgacatgataataacgtgtaatgttttatttcctattaattgtctcgcaatatgaggtgtaattaatcctaaaaagctaataccaccgacaactgaaattgcggatcctgctaatattactgctaaaattaacaatagcattttaatagttttaacttttaaaccgagtgcggttgcaacagcatcacctagattcaatacatctaattgataactcaataaaatgatgattggtatcgttattaaaaaccaaggtaatatagtataaatattcgacatatcatgtccatatagactacctgtcaaccaaacaagcgctttgtttgcttccagtggatttctgattaataagaactgcacaatcgccgtacatattgcgcctattgctaaaccaattaaggcaagctttgaacctttaacatcatattttgaaattaaaaatgataaaaataaacttactgcaaaggcacctaagaatgaacctataggtaatacaaacaatggtgctgttggaaaggtcataataataatcacagcagctaaactggcacctttagaaatacctataacatcaggtgaggctaacgggtttcttattacagcttgtataattgcacctgaaatagccaagctactaccgataataataccaagtaatgttctaggtatacgatactcatttaaaataaaatcatcttgtgtaaagattcccttaatagcatcaatcggatgaatcatgacagaccctacacataaacttatgaatatactcacaattaaaaggattgtgattaaactataacgacgtataattttcgttgtcatcatattcttttcacccctttaatcgttataaataagaagtaaagtgcacctacgaatgatgtaacaatccctactggtgattcataaggatatgtaattaaacgacttaatacatctgatagtagtaacaaatctgcacctataataaatgttaatggaatcatgactaaataattcttactcacatagcgtttgactatatgcggtacgattaagccaacaaatccaattggtcctgccactgacaccgacatacctgtaagaataatgactaatagtccaatgataattctaactttatttatattttgacccaatcccttagcaatgtcatcgcctagttccattatcgttagttgacgtccaataaaaatcgttacaattaaagcaccaataatccatggtagaatggttaaaatttcatcccacttcatactggataatgaaccgacaagccaaaacatcacttgttcgtttgaattctcattcaaaataataataccttcggtcatactactaaaaaacaaatggatggccataccagccaatgctaatttaatgggtgtcatacctttcgtagcacctgaaagtgtataaacagttaaaccacctataaatgcacctatcacacctaaatataatgcataatattctaatgctggaatgataatcgtcacaaatacaatgaaaaacgatgcaccagaactgacaccaaaaattttaggtgatgctagcggattgcgtgtcattgcttgcattaacaaaccagataccgctaatgcaccgccaataaataaccctgcaatcatccttggcatacgtacattatgcaataaaaacgttgctttcgtatctgtatgaccagtaacatagtgaatgatatcgctaaaattaattttcgaagaaccaatcgccatatttaaatatatacaaataaaaagaaagcacaaactcactatatacgtgagtgttgtgcgtctttttcttttatgatctatggcagattggctacttatttcttttatagccatttacttccaccttacttttgttctttttttgataattcaacaagttctttagccatttcttcagaagaaattaagccacgagatcttgcccaaacatcacggtcaacaatatccacgcgattatttttaactgcattcaactttttccatgttgcatcttcttgtaacttcttgaattcagcagaatcttttttagcatgatctgtcataatgatcatacgctctggatttaaatcagctaaatgttcagtgtctaattgtaagtaaggtcctttcaaatatttacttaaaccttttgttacatcgtcacttaatgcatttttaaatcctagttcgtttaaaaattgtccaacatatgaatagtttggatgtgctaataaaccagctttagcaactactgctggaagcactttttgatttctatcaaatttaatttcatctttatacttattgattaatttatcatgctcagcaagacgtttttcgccttctttttctttatttaaagctttagcaattgttttgaacgaattaatattttgtttgtagtctccatcaaaactctttaatgataatgttggtgcaattttgtttaattctttattaatacctttatgtctactgctatcagcgataattaaatccggttttaatttactaatttcttctaagtttggctgtttacgtgtacctacagaagtataatccccaattttttctctaactggtttaatgatacgttttttcttaccatcatcagcaataccaactggtttaacgtctaatgctgctaatgcatctgcaaatgagtactctaatacaacgatacgttttgcatctttaggtacttttactgtaccattttcatcttttaccgaaatagtatctttagttgatgattcttttttacttgaattatccgtattaccacaagctgcaactaaaagtaaggcaactattaatcccaatatactaaaagtttttagacctctcatcgttccactccttaatatgtataacttcatttattattttattgataacaattatcattgtcaagtagcgttcaatcttttttgtatttctaaaatgtatgactatatatttcctctaataattatgactacaattagcacatttccttagacaaaatactgataatgtatcattgctatatcatctttgcattaatacaattgacaccatttagcatgaccgttatccctgtaattcagctgatattatctgttgcaattttatgtgacgaactgttgcacttaatttgataaatcaacaaatacaaaaaatctaagttgaacaattatgatacaaccgtgcaaacgatatgtagtataacttgtcaacttagacttattgataaatatattaatagtggtttaccatagcaggagatttcacatcaaaattttgaagtagcgtatcaatctttgaatcatcaatatataccttatgtaaatttttcatatacatcgaatgagaaagtgcttcataatttaatgaaaaagatatatgatctccaacttgatagtgtccttgaccatttaaatcaagcattaaatgatcactcgaagcgcctaaaatattgatatgctgatccataggtgaaatattatcgacttttgtatctaaataaccaatatctacaatagcttgtaagaatgattcatgcgtttgtgtattaactcgaggtttaatttctaaaatctcagcctccaatgtaatcgcatcttgatataacatagcgatcgcttgatttgtcgttgtatcaacacctctaaacaacgtttcacctattcgcaattcatttattttacccaaatcattatataaaagttgtggtaacatgctcgaattaccacctgaaataattttcaatcgatatcctatttctctttcaacagctgagacgaatcgattaatcataaagatatcatcatcacttggcgcatcagatttaaaacacataaaattgaatgctaaacctacaaaatggatatttttcaagtgaataatctctttaatataatctaaaacatcataagtcagaacaccttcacggccatctttccaatctaccattaataaaatcttatgtttttttcctaaaacttctgctacttcatttatttgatgtatggtagataattctgtttggatactcatatcaactttttctatcatatctgaaatctcttttttggcaggcgtacgcaataacgtatatgttaaatcctgatctgcaatactaattatgttatccaatctggattctgcaacatgattgatacctaacgcttttaagctttctacaattgtacggtcaccagctatgcacttaattactggtgtgaattgcatatttttactttgaaaaactgtttgaagtactttggcgttatatttaatcttcgatatatttatgttaacgtgtgccatgtagtactacacctctttttttatcggattatctaactcaatatttaaatattgctttactttattttccattctcatatttaacaacgctttgacagtaattgttggtccaaacaaaatatcttttaactcatttgcatgtggtagtgttgggttaatggcatgcgctactacttgctgtactatgttaaataattcggtttcttcaacacaatcatactgattaaaatgatggattaattctgccatttgattttgaataacagcatgttggaattttgcaatcactgcatctatagaatcagctattaaactatcatttgtaattttaatatctgatacacgatgttgtaatgtttctaaatcaattctagaaccacctaaatctctcactaaaaattgaatgtcaaaatgtggccccaagttcactactgtattttgcatgtgtgcttctaaagcaattccataattttgaataaaagcaattaaaggcgggattaatgcttgagcgtatcgttcaataaatgtcgtaatactttctttagtaattccttgatttaaccactctaagtaactatccacgataactttttgatctattggatttttattaactagacttgcactaactactgttgcaccttttccatcaatttcaggcttttgtcttataatacaagcaagctgacgtgccctatctttatcaacatttgcatattcaccgaacggttccatagcaactttaaatactggatattgattcaacatgttttgtaaagcataacttaactttggtccatctacagtagtcacagttgagactgttctaacggcacttgttgcttgtgcatcgacgggcaacttaacatggtatggtttatcaattaaagacatcgtcctaaatgataaagttgcttttgaaagtattgtaaacggcgttggaattaatatttttttagcaatccatgcttcaaaatatttccctatcgtatgatcatattgccaaggatgtactaaaatcgctctatagtcttcacttttcaaacctaaactctttaaaaacacacgaatctgattgtagtattcgggaattatttcatcaataataaattgatcattaccatccatagctgtgcacacaacatggtctttttcaatcatcataatttgcaaagggatttctttttcaaactcaggtgcatatgctcgtacttcttccatagttaagggcaatttcgttttggttaaagggtgtgttggatgcccctctggtaccaaactctcagaataagttaaatcatctgtcttatcactatcttttacatgttgtaaccatgaaaaaaagttaatatcttgtggtaaccttgaaaatttaaaactttgacttattaacgtttgtctgtgagacatttgcttatatgtttcaactaaactatctcgactgtgtattaactcttcgcgtagtcgctctgaaatagggatatcaaagtcatgattcaacacatctaataaaccttctaaagttataattaatgacgtttcacctttatttaaataagtaatatcacctgtaaactcatagcgttctaatgcactttttctaacaacttcaatagtcaacacatgcatatgatactgaatttcaattaaagatcctttttgcgaaataaatgtttgctcggggtaaatacgttctttaataatggcgttaattacacgatattgaatatttctatctgcctttgcccattcaagatataccatgattactttcctccaactttaacttcaactttctatttataaaatagaataccattgtaatgcatatagtacttattcccattattgaaaaagttctaacaatgccaaacacatctgcacatatactcattaatagacttcccaatggaatcatacctctatccatcataataatactcagtactttaccacgttcataatctttaacattattttgaaaataaacgcgatttgtcgtacgtgcccattgactaaataacccaatcaatgtaatacaaatgaacatgatgacaatattgtgaaataccacacctaacaaagcaatgccaaataaaaatgaacttaaataatacatatttaccataccaatatatttaagtactttaggtaaaactagcgttgcaataataccaccaatggcacacatcgtcatagcgataccaaatatttcagatttccccggaaatactttgtttgtcaaaactggtaaaagtgtcgtatatgaaaaacctgtcgccataatcaataatgatgttataaatatttgtcgaccttccatatgtaatttgaagtaatctataataacttttaacggcatgtatcttgatgcatcttcaggtattttagttactttaaaatgtaatggtaagcataataaaactgcgataaaataacaaattgcctgtgcaagaaatgttgttggcgcatgatagactgctaatatgacaccagcaatggcaggccctattgaacgacaaatattaatgatgaatgaatgaaatgatacagcttgtgtagtagatattttatctgataaatctggtaagattgcttgtcttaaaggtgtttcaaccgcacttaaaatccctcttaatgtcgcatatataataatgacgctaattggaattgcagtgaaactatacgtgagcacacataaaattgcagttactaaaaatgatgatgaaattgtaattctcagcaatcgccctttatcatatttatcggcaattgcccctgcccacacacttagtaataatattggtacaagtctgcaaaaattgacaatccccagataaactgcgttatgataagtggtaagtacaaaccaatttagccctatttgtccaatccaattacctagaaatagtagaaaagaactgctaaaaaaatattttgtcataaaacttacacccgcattctgttgataataagaatcattatcattaatatggattatacaaatctatcttgcttttgtaaaatatttcatagaggtgaattatgaacttgaacttaatttttaaagaacagacattaaaatttaacaaagaagaacaagaaacatatttatttttacaacaacataatagcgattgggctaatatttttaaagagatgattttacaaggaagagataaagtcactcagagattggtcacatcaatgcatcgcgaaaacttagttaaagcgcgcactcaaagtaagaaaatattgagtcgtgatttgattatgttagatatctcaacgactcatatactagaaatccagttcccacaagctaagcaaacattatatgctcctatcactggagaacacgcctttgatcgaattgatgttgaaggccctttctacattaaagatgacattacaaatacgattacacgagtacaccatccaaatgaaattcttgagtgtattttaattgaagcaccagatttaaaaaatgctgctagtgatcaatttcagcaagatttaataaacagtgcaactaatatgacatttgcaattagctatcaagcactgtcaatgcaacatgattctgcacctttatttaatattatcgaaaatagcgaagatagttacttgcgttcagagcaagccgttattgaaggtcatccgctacatcctggggctaaattacgtaaaggtttaaatgcattacaaacattcctatattcttcagaattcaatcaacctattaagttgaaaatagtactgattcacagtaaattaagccgtactatgtcactgtctaaagattatgatacaactgttcatcaactatttccggacttaattaaacaattagaaaatgaatttacgccaaagtttaactttaatgattatcacattatgattgttcatccatggcaattagatgacgtattacattctgattatcaagcagaagtagataaagaattaatcattgaagcaaaacatacgttggattattatgctggtttatctttcagaacattagttcctaaatacccagctatgtcgccacacatcaaattgtcgacaaacgttcatattacaggtgagattcgtacattatcagaacaaacgacgcacaatggtccactaatgacacgtattttaaatgatattttggagaaagatgtcatatttaagtcctatgcatcaacaattattgatgaagttgctggtattcatttttataatgagcaagacgaagcagactatcaaactgaacgaagtgaacaattaggtacattatttagaaaaaatatataccaaatgattccacaagaagtcacaccattgattccttcaagcttagttgcaacctacccatttaacaatgaatcacctatcgtgacattgattaaacgttatcaatcagctgcatcattgtctgattttgaatcatcggcgaaatcgtgggttgaaacttatagtaaagcattgcttggtctcgtaatcccactagttactaaatatggcattgcattagaggctcacttgcaaaatgctattgcaacatttcggaaagatggtctattggacacgatgtatattagagactttgaaggtttaagaattgataaagcacaactaaatgaaatgggatacagtacatctcatttccatgaaaaatcaagaattcttactgattcaaaaacgtctgtgtttaacaaagccttttattctaccgttcaaaaccatttaggcgaattaattcttacaatctctaaagcatcaaatgattcaaacttagaaagacatatgtggtatatcgttcgtgatgtactagataacatttttgatcaacttgtactttcgacacacaaatctaatcaagtaaatgagaatcgcataaatgaaattaaagataccatgttcgcgccatttatagattataagtgtgttacaacaatgcgtcttgaagatgaggcacatcattatacttatattaaagttaataaccctttgtatcgagaaaataattaaggttatagaattttattaatcgtgagctcaaggattacattaacttattaaatacaatctatacaaatgagagaataatacattttccatattcaaattattaaaaatcacaaaaaacaggctgggacataaatccctaaaaaaacagcagtaagataattttcaattagaaaatatcttactgctgttctctatttatacaatacttcgtattgaatggcttcgctttcctagggtgccgtctcagcctcggtcttcgactggcactgctccctcaggagtctcgccattaatactacgtattaacatgtaattttacttttacatacttttaaaaaataagacactttgccaaacttgcacataaatgtttaattcaataatttgaattttctgtgttgggtcccttcgtataatttaataaataccactaaactaaattaatgaagtgccttatgtataaaaattataacttgatccaacttacactaccaatagaaacttctgttagaattcctcaaattgatatttcgcgatatgttaatgaaattgttgaaacgatacctgatagcgaattcgataaattcagacatcatcgtggcgcaacatcctatcatccaaaaatgatgttaaaaatcaccttatatgcatatactcaatctgtattttctggtcgtagaatagagaaattacttcatgacagtattcgaatgatgtggttagctcaaaatcaaacaccttcttataaaactattaatcgtattagagtgaatcctaatactgatgcgttaattgaatctttatttatccagtttcatagtcaatgtttaaagcaaaatcttattgatggtacaaaagtagaagctaatgccaataggtatacatttgtgtggaagaaaagtattcaaaatcacgaatcgaaattgaacgaaaattcaaaaacattatatcgtgacttagttgaagaaaaaataataccagagataaaagaagatggagatagcgatttaacaatagaagaaatagatttaattggtagtcatttagataaagaaatcgaaggtttaaatcattctattgagaacgaagatagtactcaaattagaaaacagacccgtaaaaaagaactaagattaagaagttcaaaaataaatttgatgattattccgaaagaaaaaataaatatgaagaacaaaaatcgattcttaaagatagaaatagcttttctaaaactgatcatgatgcaacttttatgagaatgaaggaagaccatatgaaaaatggccaacttaagccaggatacaatttacaaatagcgacaaattctcaatttgttttatcctatgacctatttcaaaacccaacagatactagaactttaattccatttttaacaatgattcaaaataccttcggttatttaccggagtatattgtagctgatgcaggttatggtagtgagcaaaactatatggctattatagatgattttaataaaacgccacttattacgtatggcatgtttattaaagataaaactagaaagtttaaaagtgacattttcaacacttaaaattggaaatatgacgaacttaatgatgaatttatatgtcctaataacaaaagaataggttttaaaagatatgcataccgtaatgatagatatggttttaaacgagacttcaaactatatgaatgtgatgactgttcatcatgttctttgagacatcaatgcatgaaaccaaattcgaaatccaataagaaaatcatgaagaattataattgggaatactttaaagtccaaattaatcaaaagctttctgaaccagaaacgaaaaaatctatagtcaaagaaaaattgatgtagagcctgtttttggatttatgaaggctattttgggtttcactcgaatgtcagttcgaggaataaataaagttaaacgagagctaggttttgtattaatggcacttaatataaggaaaatagcagctcaacgagctgtacattataaaatacatatcaaaaaaagctgatttctatcaaataattaatagaaatcagcttttttacattgcctaagaatttaatgtcccaagccctttttatcgaataacttattgtaaaccttgtctttcttggttattgttttcgttatttttttcgtgtttttgtttccactctttttgagtcattacatcgtcaacttgcatgttaacttcaactacatctaaaccagtaatatatttaacttgttctttaactaattcagttactttacggaagatttttggtgctgattcaccatattctaagattacttttaagtctacagcagcttgtttttcaccaacttcaacagatacaccttgagtaacattgttgccacttgagaatgcattagtgaatgtatcagttaagccacctttcatatctaagatacctttaacttcacgtgcagcgataccagcaattttttcaacaacttcatcagagaatgttaatttgtttttgaattgaggctcctgattttgttcttgttgtttttgacgctcttctctttctttttcgttaacaccagtttgattgtcgtatgcttgttttgctttattgttatctacagtcataatagattctccttttacttgttaatttttatatttttttaattaaattctaaattaatgaattaactccatcgatttaaaaaattcataaaatcttgcttacggtctttcatatacccaatacctacaccaattaaacataaaacgatgataagtactgttttccaaaaacctaacgttaagaataatatcgcgattaatagaaacgctaggaaaccaacgattctccatttaaatacttttaaaaaattaatcacttgttgtgtagagtcttgtccgttttggttatgattgttagccatgatatacctcccttacaacactcgtggaccagaagttttctgatctctcacattaacttctaacttacgtactggcatttctgtgaaatattctacattctttttaatatccgaacgaattgcttcagttaaagattgaacttgaacattatttggtacgaaaaagtcagttttaatgtcgatataagatttattttttttgttatatagtttcgcaactacatttggttgtcttacttgatcatattttgcaaccgtatcgaatgccgtcttttcaacagctttacgagatacgtaaacatgaccatcatcgaagtctttgtataatccaggttttcgatgcgtaggtttgaagatactaaatactaatataagacctattaatatcaatagtgcagcaagtgaaataagtaatggttggaaccattcaaattgaaggaagtagtcttgatattcagttatacgtccatcttggatatacatgaataacaggaaccccacgattactactattaataagccaaggataaagtttttaagtcgtttcacccctaacgacacctccttagttaaagttaatttaaaaacatattaaatatgtacccatcagtttttttcttaaacataataaattaataactttaaatttatttttaatatataagatgaagtaccatttagtaatatattccctagtttttgtaaataaaacctcattattaattaattttcgtcaatatgttttgaagaacgatattctaaaatatctgggtcacgatgtttaattaaaaccttattactatttctcggtttctcctcactcaaagattttataagcgaccatatcatcgctataatgaccacggaaaatggtaacgcagcaatgattaataaattttgaattgcttgagtaccacctgtgtaaatcatgatgattgcaaataatgccataatgataccccaactcactttgacaaatgacttcggattaatatcaccacttgaactcaacatacctaaaacataagttgccgaatccgctgatgtaacaaagaaaatcataataacaagtaaagtaattaagcttaatacaaaacctagcggataatgttgtagcgtcgcaaaagttgctgtttctgtcgcagctttagcaatatcggcaatatgattatcttgtaagtaaattgctgacgcgccgaataccgcaaagaatataaagcaaactaacgccgggacaaaaagtacacctagaataaattctttaatcgtacgtccttttgacacacgtgcaataaatatacctacaaatggtgcccaagatatccaccatgcccagtaaaagattgtccaattttgtaaccattggaatttttgaccacctgtcggaatgcgtaaactcatactaaagaaatttgcaatataattacctagaccattcgtaaatgtatttaaaatgtatagcgttggcccaacaataaaaagaccaataagtactacaaaagcaagtaacatgttgatattactcaacgttttgatacctttatcgatacctgaccatgctgaccaagtaaataatatggttgcaatgacaatcaagattacttgcatcgtgaagttactcggtacattaaataaaaaatgtaaaccttcgtttatttgcaatgcaccgaaacctaatgttgcagcaacgcctgttactgtagctatgactgccaatacatcaatggcaccacctaaaggtccacgcattgccttttcacctaataaaggcgtcaatgtagcgctgactaagccaggatatcctttatgaaagctaaaatatgcaaacactagcgcgacaataccatagactgcccatgcatgaatcccccaatggaaaaatgaaaactgcattgcatcattaattgcagattgcgtgccagctttatgaataggcgttaatttgaaggcatgactgattggttctgccgttgtccagaacacaagtcctattcccataccagcactaaataacatagcaaaccaagacggcaatgagaattcaggatcttcgccttcttcacctaatgtaatgtttgcgtatctcgaaaataaaatatacacacagacaaataaaataactaaaacgagcaataaataataccaagaaaaatgtagcgcaataaatgtagtaatgttttgcgtgagtttttctaactgtttcggaaatattgctccaaaagcaacaaatatcgtacatatcactaaagatacccaaaacactagacttactgatttatttttcataaatacaaaccctttctgtgtaatggtaagttcatacccataactgcaacattttaatcatttgtaattttatatagacacaattaataatgcctcatcttttaaaaatgatatataaaacacactcaaattatttatcattgagcaacaaagtattttattgtatttaagtaatgcctttctagtgcattattgatttgatacctgcaaagttgccatatttccgtttagaatcaatagtcgctagacacaaaaaataagtcgcctatacagtattttctgcataaggcgactttacttactaatctatatattaattactaattttccaatcattgattgtttttccaacaattgatgtgcttgatataagttttcaggtgataaaccttcaaaaacttgtgtcgttgttggttggtaatgccctgattctatatttttcgtaatatcttctaaatactcatgttgtttaatcatatcaggcgttcgatgaattggacgcgcaaacataaattcatgtgtaaatgttatactttttaattttaatgcatttaaatcttgatcttcattaaaagctacgatagtcgtaatatgccctaatggttttatcagttcaatcatagtattgtaatacaagtctgtattataggtgcaaaatatataatctactaatggaatttctttaaattgacgcactaaatcctctttatgattcaatacgatatctgcgcccatcttttcacaccactctgttgtttcttgtcgtgatgctgttgtaatgacagttaaaccataccgtttagcaatttgagtggctatactgcctacaccaccggcaccattaatgattaagacagacttcccttcgttttcagcaggattcgtagaaattttaaatgtatcaaaaaacgtttcatatgccgtaataccagttagcggtagactaaccgcttcattagcacttatgttgtgtggtgcttttgcaactatagcttctgacaccaattgatatgtcgcatttgatccttgtctatttggcgatccagcataaaatacaacgtcacccggactaaataatgtaacgtctggtccgatagcttcaacagtaccaatagcatcaaacccaagtacacgaggtgcttgagtgacttccatttgtcgttgctttgtatctacaggatttacactaatgctatttactttgactaagatatcatcgttttctggcgttggctttctttgttcgtatactttaaataaatttccttcttccaatttaaagggcttctcaaatcctatcattttcatatcgtttcacctcatttatgaacttatttcttattatacaaaatagaagccatgtgtgcttatatcgcagcatcatgactcctttttcatttgaatatataaataattacagacgactttcgtattaaattttagacttatttctaccatgttgctgaacaaatttactttagataaaaaattattaaattttggtcaattaacaaagttagtttgttaaaacgtatactttattattccgttactttaataacttgtttaccaaagttatcgccagtaaataaatttttaaatgcatgtggcgcattttcaaaaccatcttcaatggttacttgtgactgaattttaccttcttgaacccatgttgcaagctgttcactagcttctttaaaagcattagcgaattcacttaccaagaagcctctcatcattacttgcttcttaataagcgtaccttgaatacgtggtccgatatcggcttcaggatgattatatgacgaaattgcgccacatactggtacacgtgcaaaacgatttaaatgcttaaatacttcatcgccaactgttccaccaacattttcaaaataaacatcaataccatctggtactgcttgtgctaacgcttctgcaaaatcctctttcttataatcaataccagcgtcaaagcccagtgtctctgttaaataatttacttttttgtcgccacccgcaatacctactacacggcaacctttaatcttagcaatttgacctacaactgaacctacagcaccagatgcagctgaaaccacaacagtatcaccggctttaggttgtccaatatcaagcagaccatgatatgctgtttgtcctggcattcctaaaacacttaaatataaatcaagtggtacatctgtcgttggaactttagtaatttgatccgcttggacatgattaatgattcgccaaggcaacatacctacaacgacatctccttttttataatctgcgagtgtcgaatcaattacttttgcaacgacatggctaacaatcggtttaccaatttcaaaaggctgtacatacgaatctgccttagtcatacgtcctctcatatatggatccactgaaatatacagcgtttgtacaagtacaccatcgctctcaagtttaggcgtgtcaatctcttcaattttgaatgtatcctcttgaggcatgccttctggtattttgttaaaaagaatttgtttattttgcatcattaatcacctttctttatttgaaacttttacttatttgttacttaagcgttaagtttgaattgtgtcttcgtgatgtctgtatgcaaatacattcttagttgttatattttgacttaagcactgattcattcatgtaacttcaaccacattatatttgctataatcataaatttaaaatgttacgacttagacattttatggaaactctcaaacaatagataatttttgaaaagctctaatattacaagcttttttgccccagaaaaactagcagttgctttattttttccataagaagtcgattaactcattagcaatattttcattctcatgaagctgactatgttgtgcaggctcaccttcatatttagattctcgataacttttcggactatttcccagtaaatattttaatgatttcgaagaactattagacactctgccgtctgaatgtgtaccatctttcaaatccccataaatatttagcacttcgatacctttacctttataaatatcttttagcacgcgtaattgctgataaggttgattcattcgacttggtttaccatctttatcaactgtaatttcattgacatcttcattcatatttaaaacaccattaaatgtcactgcaatattcacttgtttgtttaactgtggcagtgacttgtcgttaccatatgtcatcatatattgtgcaaatgttaagttccccattgagtgaccgacaaagttgaatttatcgaaattgtattcagattgtaacttagtcagtacatttttaaaccacgcagcattcttatccaaatagccttgtctgttattttcaagttcaattttcacaataggattcactgcatcttttcttagtttccctttaaatgtcactgcaccatcctttgaaacgtaagcagtgatgatatctttagttacccctcttttttctgcttgcttcaccataaacttttcagaattggcactaccaccaaatccatgtaagaacaatgttggaattggctttttaacaaattgctgttgttgtattttaaatgtttgtgcctgtcgttgactaaacaccaccataataatagagcctataataatagcgaccgctaacaatgtcgtaataattacaaaaattttcttcacacttttaactcccattcatgtcttttatataagtataaaggatgtgattaaaaatgtcctttagttgattttgaatacatcattaacttttaagatgactttggaaagttgtccgttaacgtttgttaattgattgcttctttagctttcaatggtgtgtcacccattgattaatatataaatatgtatatgcatgtttaatttatctctttctataaataaagacctaccagcactcgactgataggccttttaatatctataattatttaatttcttttgtttcggctaactctttgtaccaataagcacttttcttaggataacgttcttgagtctcaaaatcgacatagaataaaccatatcgtttttcataaccatttgaccaagagaacacatccattaatgaccaaataaagtaacctttaacatttgcaccatctataatagcatctgcaataacgttcaaatgttgtcttacataatcaatacgtgcatcatcatgaactgttttttcagattcaataaattcatctttatatcctaaaccattttcagtgatataaatcttatgatagttaggataatctttaacaacacgcatgatttgatcatataaaccttgaggatagatcatccagtcccagtctgtgcgaggtacgtcgacatcaaattcacgttgtccgacacctttaagttggtatttagaaccgcctttatcacctgtcgcattatgcgtgatttcagattctccatcgtaacctctcatccaatcactcatgtagtaattgatacctaagaagtcgtttaaatctttggctgcatctaaaatggcataatcttcatctgtaatgtttaatttaccgccattaacagataagatatgttgcacaccttccatcgtttcacgagaatacttacctaaatatgttgcatctaagatgaatttattatggatgatatcttctaattctgctgcacgaacatcttcaggatttgatggatcgaacggatattttgttggcaatgcgtgtacaacaccaatttctcctttgtatccgccatctttaaataattttactgctctagcatgagccaccatcatgttatgatgtgattggaatactttttcaaaatcatatttaatacctggagggaatttacctactaaatattgaccatcaccaataggtccaatttcattgaatgtagtccaatattttacttctgggaattctttaaaacaatattcagcataatctacaaagtagtcaatcgttttacgatttagaaaatcgccatctttgtgtaacacttctggtgtatcaaaatgatgcaatgttacaaatggttcaacatgacgtttatgacactctgcaaataacttatggtaatactcaacacctttagggttaacttcgccatatccatttgggaagatacgagaccatgcaattgaaattcggataccattaacaccgaatttttcacttaattctaaatccactggatatctgttataaaaatcactcgctggttctgcagtgtaccaatagttttcttctaaatacgtatcccatgctacgcgacctttaccatccgtatttgtcgcaccttctgcttgatatgctgctgttgctccaccaaaaataaaatcttcaggtaatgttttagtcatatgaaaaactcctattcttaattttcaaattgttgttgaacgaaatcaagggctgcttggccatctcgtgtcaatttgatatattcagcaccttgagtcttcgctaatttaatacctaatctatctgtatcttgcttaatatcttcatagttagacgcaacttgtggcgctaaaatgattaattggtactctttcataatgtccatatgtgcgccatatccgccagctgccgctttcactggcacatgatattcttcagctgctttattaagtgcattggctaataatccacttgtaccaccaccggcacaaagtactaagacatttgtttgttctgtgatatttgaagctttagctgcatcgtctgatacaccacttgccgctaaaattgaatcagcttttttcgtatcaaagtttgctgcaactttttcttttaaatctgaattactttctttacgtccttcttcttcatcaagaatttcactatcataaacttttaggaatgggtagtaaataataatatctacaacaatcaaagtaatagctagtacgaatgaccataaaccaaaacctgtacccatgataatgcccaatggacctggtgttgtccaaggtaaattcacactaaaactattcattcctaacacttcaacgaaaagtttgaaaatccatacgttaacaattggtgctaatacaaatggaataaagaacacaggattcaatactagtggtgcaccaaataaaattggttcgtttacaccaaagaatgttggtacaactgatgcacgtccaatcgctttgtttcgtttagatttcgtcatccacataaacatgaacgggacgaccaatgttgcacccgtacctccaaatgtaacgataaacatttgtgtacctgatgtaataattttatctgcgtgttctccagcttgaagcaacttgaagttcgcttcgatattcgcatatgtaatggctgcaattgctggctctacaattgacggaccatgaatacctacaaaccagaataatgcaaaggcaccaaagataattgtgacaccaatccatccatctgctgctgtaaataatggttcgaataattttaaaataccttccgctacatttgatttaaagctgttgcgaatgactaaatctaatgcataaagaatgatgattaccgctgaaaatggaattaagtccttaaatacttgtgaaatattcggcggtacttctttcggcattttaattgtaatattgcgcttcacacagaagttataaacaataacagttacaaatgctgataagaatgctgttaataaacctttagttcccataaatgcacttaagaatccaccatctttggctggatcagaagctaagaacaagaatccacacatcgctgctagcattgtagaaataaagttaatttgatttgtactttctagcttacggttaaatgaatctgttaaagatttcgctgtcgttcctgctactaaaaatgctacaagccccatcgtatagttatatggtttcattaaaatggcttccatgcctttatcccatttaaaaccaaatatatttggcacatatgcaattaatagaaagatacttgagaataagatgacaggcattgcagaaataaatccatcacggatggctcttaaatatatgttacgtgataatttctcgaaaaatggcttccctttttcaatttgtgcgatcaatttttgcatcattgtcatcaccctcttttataaaattctaataaatgcttcattaaatctttcagtaaaattgttgtcattaaatgatcttgaccatgcatcatcgttacactgtatgcaatatcatcaccttgcgcttctttagccaacaggcttgtttgtgctctatgcgcttccgcaatgcaattgtttccttcttcaatcagtgcatctgcttttgcaaaatctccagcttgagctgctgttaatgcttctaaaaacttagaacgtgcatcccctgcaaatgcaacaatttcaaaacctaataattggacttcttctctattcatagcattaatccccttttaaacttattttctttgtttccaagatgtcgcagtatcttttaatactttatttaagtcatcaatatttttgaaaccagttgtacgtaaccattcacgagcagcatcttcaccttgttcaatgtatacttgaacagcaccagaccatgtagcacggccacaaagtaccccgttgaatttagcaccagcttcgtgagcaaattttaaagtttcttggaataattccgcagaaacaccagcacttaagtaaatgtatggtaaatgagttgctgcatcttgatctttaaagtgttgtgccgcttcctcttttgtataaaccacttcaccttcagcaaagccttctacatatttcatgtttactggtacttcaactttcaatacatcaacgttaaagcgtggttctgagaataatttcattgcttcgttaacctttctaggcttaacttttgcgaattcaacactaccgttatcaggaatgttgtcatcgtatgttaatacttctaaaaagaatggaatatcttctgcaacacattctgaaccgattctttcaatgtatgctttcttttgaatgttaatttcttcagcatcatcaacatcatagtaaagtaagaatttaacagcatttgcgccttgttcttttaaacgttttgcagaccactctactaaacagtcaggtaaacgacctttagcgtttacgtcatatccagttttttcataagcaagtaataatccacaatctttgttacgtgcatctgaagctggtaaaccatattcaggatctaataaaattgaagatgcatattgtgttaattcttccgcaactaatacttttaattgttcaatttgagctacagttggttcttcagtttgatgttttgccatcatgcgttttaaagcaccacgttggtcaaatgctaatgcagaaatgataccttcgttgttacttaattgttcaattgatgcgattttttgattcgattttgacattttttacacctctaaaacttcaatttgattgaataaatcatcataattatttaaattgacataacctgtttgtgcttcttgtgcattcagcatgcctaaagtattggctttttttagtaaatcgtggtcgttttcatgattaagaattgctgaagtaattccagcaactgtagaatcacctgaaccaaccggatttaatacacttattgtcggaatattcactctatagaatgtatgattgtgcttagcgaatgcaccttgtgcacctaaagacacaataatccactcaatcccttcgaataagggttgtgacactgcctgtttcaaactttctaaactttcatcaagtggctggttaagcaattgatatagttcagaaatgtttggtttaatgactgtaggtttgtatggattttccaaaactgtttgcaaagttgcacccgagcaatctaatatcacaggcacacctttgttttggcatcgttcaatgatttgtgcataataatcttgatttaatcctttaggtaagctacctgaaatagcaactgcttcaactttttctaataattgttcaaaatgtttaataaatcctgcagcctcttgattatcaatctccggtccctgctctaaaatttctgtttgttgcccttcatgtaaaattgcaatgcagtttcgtgtttcacccttaatgttataaaatgcatgcttgatgtcggcatgatctaattttttagcaataaattgacctaattcaccgccaataaaaccactcgcaaggactggctcacctacttgcgcaagtactcttgttacatttaaacctttaccaccagctgttttacttacttcttgaacacgattaacatcatctaatttcaatgctgttaatgggtatgaaatatcaacggatggatttaatgttaaagttaaaatcatatgtgtcgtcccttaatcgtggtattcgcctctgtcccatttttctaagaattcatcaaagaaatgtggatcagcttgatctgcattgcttgtttctaaatgtttaattttagcgattaattttttgttctcttcagttggtttatattcagcattaataaatgcatcgataatatcgcacattaataactcacctataatacgtccaccgaagccaataacgttcgcatttaattcttctttagcgtataacgctgatgtcatatcacgtactagtgctgaacgaacgccaggtactttatttacagcattgttaataccaacacctgttccacaaatacaaacacctaagtctgcattaccgctaacaacttgttcgccaacttttttaccaaaaattggataatgtgttcttgtgaaatcgtatgttcctacgtcaatgacttcatgtccttttgattttaaaaattcagatacacgcatttttgtatctgtaacaatatggtcgcatcctaatgcaatcttcatagtaatttttcctccttagcacattttattaagcatatctacgcggatttggtgtctaccaccatcgtatttaccttcaacaaaacctttaacgacatttttcgctaatgtgtctccaacaatttcagatcccatagtgatcattcttgaattgttatggcctctagtcatatatccagagcgttcatctgatacttcagcagcaatcatgcctttgatttttgtagcaaccataaagctacctgcaccaaatgcatcgataacaatacctaagttaccttcttgactttgaacatcttttgctacagccaaagttgcatcaacaaagtcaacttcctgtccttctgttacgtcaacaacatcatatttattgtctaataagtatgatttgatgacttcttttaatcgtttgccagcttcatctgaaccaataataatcgccataataagactcctttttactttaattttgaaatacctttcttaaaatgtgacatatttatttgtaggttatgaaaatcttgagaaaaggctttcaatttgattacgtttaaattataaacataaacaaacaataaatcaacataatatgtttataatacgtttgtttatgacgtattttcaaacaataagtgaacattcatattgtggtgttgttttaattaggtattcgtctgaaattgtagtaaaactttgtcgaggttcccgttgacataaatttgcataaaaaatagcccataaatgaatgcaaattcacattcacttatgagcatatagatacatattttaacaatgcagttatacttttaatttagtcgactacttcaatatatgttttaatcgtttctactttttcttcatcttcatagtccatgaccactgcagtcaattcgtttaactgacaaaatgatgtaaaatcttctttgccaactttcgtatgatcgattaacaagtatttttcaattgaattacttagtgccagttgttgcgtataggcttcatctaatgtagatgtcatcacagcacctttatttactgcgttactactaaagaacatcttgctaaatcttagtttttccaacatggcgttcgccatttcacctacaaatgcttctgtaatatggcgcatttcaccaccaattaaatagacacgaaaatgtgctgtttgtttttctaacaaaattttatacaccggcaaacaattcgtaataattgtgagcgtatgatgattgacttcttctgctaatagttccactgttgttcctggtccgaaaaacaaagtatccccatcttcaattaatgatgcagcttttttagctataaatcgtttttctgcaatttgacgggtatgtttttctttatgcgatatttctttatactgaaatgttgaattactgcgtgcaccaccatgaatcttcgttaaaatccctttattttccaattcaattaaatctcttcgaactgtcatatcagacacatttaaaccttcgacgatttcattcgttcttatcgtgccctttttattcactagtttagcaatttcgtccaaacgttcatgtttattcaatgtaaaattgcctcctttatttaggcgatgggtcattatcctttatgtttagacatcaattttaatatacatgcttattctataataaaaattgcgtaaaaactaatataatttaactgttcgattatatgtataattcatttttaaaaagaactgtttaaactgcgcttttgataatcgtaaaatgaatatactataataaaagtaaaagacgttataaatcattcattattttgatggggtgtttaacttgaaacatgatttagagacactaaaacatattatagatagttcgaatcgtattacattttttacaggtgctggtgtatctgtcgcaagtggcgttccagatttccgttcaatgggtggcttatttgatgaaatttcaaaagatgggctttcgccagaatacttgttaagccgtgattatttagaagatgatcctgaaggttttatcaatttctgccataagcgcttactatttgtcgatacgatgcccaatatcgttcatgattggattgcaaaattagaacgtaatcaacaatctttaggtgtcatcacgcaaaatatcgatggtttgcactcagacgctggaagtcaacatgttgatgaattacatggcacgttaaatcgtttttattgtaatgtatgtcataaatcttatacgaagtcagatgttattgatagaactttgaaacattgtgataattgtggtggtgccattcgaccggacatcgtattatacggtgaaatgttagatcaacctaccatcataagggcattaaataaaattgaacatgctgacacccttgttgtactaggttcatcactcgttgtacaacctgccgcaggattaatatcacattttaaaggcgacaatttaattattatcaataaagatcgaacaccttatgatagcgacgctactttggtcatacatgacgacatggtttccgttgtaaaatcattaatgacagagtaatcagtatgtaaaaagcatttcccgaatggtagggaaatgcttttaattttggagttgcgtttttggaatttggagtttggttttcggaattcgacatttggaattcagaattataatgagtggaaaattttaattattgcgtgtttaatgacttggttttgtagcgatttttatttgatgaattgtttttttgtttgatgttgggatgctacttttaatggtttgtcatttgtaagattaaaaataaacataaaataagtagaaaaataaaagctacgaatattaaaaaattagatatcttcattatcaaattccgatattaaatcattatatttttcagaatatcttgcataatcttcattattattaaaagctagccatagacctctatcatcatataaatgatatattaagtttttagtattgttaattatatatatttcagaataattatcattctgattgatatttggaactaaccctttaaagtcttgattggatatagcttttaataattttttatattttatatcttttatggaacacttatatgaaaactcctcgcacaaaatattatcatccttctcctttttatattctttaaagtaatacaattcatctattgttaacgatgtaaatttttttataacatttgttttcttataaggttcactataaacatatactacatgaaccaaatttatagaatcagaaggcgaaaacaaatcttcaaaaatgtttattgcattatcatatacagctaaaaaataagtattattgatagttttaccgtcctccaaaaactggtatttatcgccacttaaacttaaatgaattgcgttttttacctttctaaaattcaacttttttatatccaaattatttatatcaaagcacataatttacaacaccttattcccttaagatttttccttctttagttaaagaagctattctttttcctttgttatttattaacttccaataagaaccaccatgtgattgccctttatttttggaaatagtccatttagtttttgaatctctccaggtaggatttttcccttaaaccttttgagtaaattcaccaatactcatccccttatcatttaacaaacttttattaatgtttttggttatattatgagtctttactgcttttagattgtaaaaattatcgtcataaatagtggcattttccgagattcaaatggtacaaagtacattgtaatatgcataatgatacctgtaattaatgtaataatagaaaagtgtatatatctcatatcgccacctgctatacaacttattaaataattaattccaagacatattaattatctaattataaccttagttacgttattacataatataaaaatatataataacttatttgcttgctcctttcactttttaagagtaaaaaataacctgaaacatagactttaacatccaagtttcaggttagtgtaatgtaaatgatttactttgttatattatgattaaacatctaattctctgcttgtaagtgctttaatcatctctggatcagcatgtgagaaaaattggctattactttcttctaatgtcgcaatttgttgtttatcttcttctgtaagttcaaaatcaaatatatctaagttttgagccatacgttctggattcactgattttgcgagtacaacaatgtcacgttctactaaccagcgtaaaataacttgtgcaattgatttgttgtatttatctgcaatggcctgcaacaattgattttggaataattgatttttaccttctgcaaatggtgcccaagcttctaccacaacattttcttgttgaagtgctgcaacttgttcttcttgttgatggaatggattaatttctatttggttcacttgtggttgaatttgattgtgaatacctaaatctacaattcgatcaacgccgaagttagatacaccgattgctttaattttaccattttcttttaactcttctaatgcacgccatgagccatatacgtcattgtaaggttggtgaataagcactagatcaagatagtccaaatttaatcgttgtaatgatcgttcgattgatttgatagtatcttcatagttaacattttcaatccatactttagtcgtaatgaatagttcacttctatcaatacctgaagcttcaataccttgacctacttcagtttcatttaaataactttgtgctgtatcaatatgtctataacccgctttaattgcttctttaaccgcttctgctgtttgttcttgaggaatttgaaatactccgaaacctaatactggtatctttacatctttacttatttcaatatgattcataaaatgaacctcctttatcttgtatgtccactataaaccatggagcgaactctatagcaagccataggtttactttctctcccaaagacgttcaacattgtcatcataattatcactagcattgattttagcaatatgattatcataattatcaattttatattgtagtaaatctctcgcatcatgaattgtctttaagttttcatttaattcttcgagttgcttatttaaaatttgcttttgctgtgcttgaatattttcatttttaggaagctgcgctaacctgcaaaattcgataagcgattcaatactgacgcctgcatttcgcaaatttttcactaaataaatccaatttaaatcactatcattatatattctatatccattttcatctcgattaactggtggaatcacaccaaccttttcataatatcttaaagtgtcttgagatatattcatgagcgctacgacttctttagttttcattgcgactatcctttcagttatgtttggtcgtctaaagtaatgttgctttatatattgtcatcttcgtttgaatacttcttattttattactcaaatttaaatttgtctcttttttaacattttacatttcatcgtttttaattactttaaaaattgtataacttaaatatttaaaatgatataatcactaagattgataatatttaattttttgaaaattattttagttgcaatttttgggtgatgcggaaaatttgggtgatcgattgtttatatgcatcaacattctttgtggattgtttgacagtagacagtcatttgtatacgttaacgaattttgaaaaattgaatcattatttaatcataatattcattgcgcacgcgcaacacaaaaaggagacatgtcaatgacatatagaataaagaaatggcaaaaattatccaccattacgttattaatggctggtgtgattactttgaatggtggtgaattcagaagtgttgataaacatcaaatcgctgtggctgatacgaatgttcaaacgccagattatgaaaaattgaggaacacatggctggacgttaactatggttatgataagtatgatgagaataatccagatatgaagaagaagtttgatgctacagagaaagaggcgacgaatttactcaaggaaatgaaaactgaaagtggtaggaaatacttgtggtcaggagcggaaacccttgaaactaattcttctcatatgactcgtacctatcgtaatattgagaaaatcgcagaagcgatgaggaatcctaaaaccactttaaatactgacgaaaataagaagaaagtgaaagatgcccttgagtggctgcataaaaatgcatatggaaaagaaccagataaaaaagtaaaagaattaagtgagaattttactaaaacaactggcaagaataccaacttaaattggtgggattatgaaattggaacacctaaatcattaacaaatacgcttatattgctgaatgatcaattttcaaatgaagaaaagaaaaaattcactgcccctattaaaactttcgccccagatagtgacaaaatattatcttctgtaggaaaagctgaacttgctaaaggcggaaatctagtagacatttctaaggtgaaacttttagaatgtattatcgaagaagataaagatatgatgaaaaagtctatagattcatttaataaagtcttcacttacgttcaagattctgccactggtaaagaacgtaatggattttataaagatggctcttacattgatcatcaagacgttccatacactggtgcttatggcgttgtactcttagaggggatttctcaaatgatgccgatgataaaagaaacaccttttaatgataaaacccaaaatgatacaaccttaaagtcatggattgacgacggatttatgccactcatttataaaggtgaaatgatggatttatcacgaggtagagctatcagtcgtgaaaatgaaaccagtcactcagcatctgcaacagtaatgaaatcattgttgagattaagtgatgccatggatgattcaacaaaagctaagtataaaaagattgtcaaatcttcagtagagtcagattcaagttataaacaaaatgattatttaaattcatattcggacatagataaaatgaagtctttaatgacagataacagtatttctaaaaacggattaacacaacaacttaaaatatataatgacatggatcgtgtcacctatcataacaaagacttagactttgcatttggtttaagtatgacgtcgaaaaacgtagcacgctatgaaagtatcaacggagagaatttaaaaggttggcacactggtgctggaatgtcttatttatataacagcgatgtcaaacactatcatgataacttctgggtgacagccgatatgaaacgtttatcaggtacaacaactttagacaatgaaatattaaaagatacggatgataaaaagtcgagtaaaacttttgttggcggaacaaaagttgatgaccaacatgctagtatcggaatggattttgaaaatcaggacaaaactttaactgccaaaaaatcatatttcatattaaacgataaaattgtcttcttaggaactggcattaaaagtactgattcatcaaagaatccagttacaacgattgaaaatcgcaaagcgaatgggtatacgttatatacagacgataaacaaacaaccaattctgataatcaggaaaacaattcagtctttttagagtccacagataccaaaaagaacatcggttatcattttttaaacaaaccgaaaataactgtaaaaaaagaaagtcatactggtaagtggaaagaaataaataaaagtcaaaaggatacacaaaaaactgatgagtattatgaagtaactcaaaagcattctaattctgacaataaatatggatatgtgttgtatccaggcttatctaaagatgtctttaagacaaaaaaagatgaagtaactgtcgttaagcaagaagatgacttccacgttgtgaaagataatgaatcggtttgggctggtgttaattatagtaatagcactcaaacttttgacattaacaacactaaagtcgaagttaaagccaaaggtatgtttatacttaaaaagaaagatgataacacttatgaatgtagcttctataatcctgaatctacaaattccgcttcagatattgaatctaaaatttcaatgaccggttactctattacaaacaaaaatacgtcgacttctaatgaatccggcgtgcactttgaattaactaaataagcaagaaaatctcgacactataccatttttatagtgtcgagattttataagtatcgccatcattcagcttgtaatccgcagaccacatcccctttgataagttctcgattatttataaatcgaatttttaaagatgtacatgcttcaatattcttatcattcattacttgaaaatgtatatgaggttcagtagaattgccagaattcccaaccttcccaatgatatcaccatatttaacattttgcccctcattcacaatgattgaatattggtgtaaatgagctattaagctatactcattttctgcgtgcttaattacaatataatttcctaaaaactgtgattcattcgtacttccaatactgttgtcttgaaccccattcactactttttcaactgtaccatttgctggcgcaatgatatcttttccaaaacaaaaataatcagtatttacttttccttgattcttatatgttttatgattttctttaataactaaatcaatagcatacctttgatgtgggtataaatagtgataattatataattcattatctccaccccaaaaaatctcatagcaatctgttgtcggcactgcgtattttaaagtcgtttcattcttaatcgcatcataattaattaacggacgcataacaaatccgataatactattatctttccaagtcactgacactccaaattgatttgcttcatctatccatatttgctcaatagtaccatcattttgagtacacacttttaattcatgtacatcagactgccttgtataagatttgaaaagtttcctaaactgccaataactaaactctcgcttcaaattttgatcaaaaatcttatatattttcctgctcttacttttatttaaataagccccaaagtttgttttattcatatatacttaacctattatattaattttggtatcaattctttctccagttcctgcgtcatttttgcgctacctgaatcgtctacacttaattggataaatcaacatataaataattttttaaagctaaagtgtagtcgattcaccatattttctaatcatcccttaaatattaatatttgcacttaaaaagtatacatatcactcaactaatcaataatcatacttaccttcaacaaattctttaacatgcagtgttatcccttgataatatggatattttgttaatctaaatttctgctttaatgcttcatctctactattcgacatcaaatatgcatgttcaagatagcttaaatatgcttcgtcattgccgctatctccaaaacctaatattgattttactggtatattatatttcctcatcagaaattgagtagcatataattttccagcatttgacggtgtgaagtcaatatcatacgcattttcaggatcaccagctaatggattgcttcgactaaatctcgctgtatagttttggtcatttgcgtatctgacaagtgcttctaggatacgactatcattgttgtgattacctgttgaatgaaaataaaaattataatgtgtttcattaccttcaaatgctctttgtggaataaattcgacattatattgcgcagaaatatgacgtaatatatcttcaatatcttcaaataaaaatggttcgctcaagactttctttttatatgtttctgattcaacatattcgccattattccaagtgaacattttagaactcaaatcagaaaagatatgtaatggtttaaacgtcatattaacttgatccattttatccatgacactttgaaatgtacttcctgtcaatacagcagtgatcacttcattattattagttagtttttccaacaatttttccatttctcttaaatgacttaaatcttcttcatttgtattatgtttaaaatatgtttcatcaaaatcaaacaataatagacgctttgacatactcattcccccataatattttaatgaatttatctataacttaaatacactataagtctcaattaaaagtataagatcgactatatgcttttcatgattattatatacaactaatcaatccctataaactaaaaacattgcttaccacttttcaaaatgcacgagtcatatccctcgttaaaaactattactaaaaattaaaatataaaaaatgcaagaagtatgttttaaactttatgaaacgtgttatacaaatagtgtaatatcatacaacccgaaaaggagattgagatatgaaactaaaatcatttgttactgccactttagcattgggattattatcaacggtcggagctgcattaccgagtcacgaagcatctgcagatagtaataacggctataaagaaatgactgtggatggttatcacactgttccttacacaatttcagtagatggtattactgcattacatcgaacttactttatcttcccagaaaataaaaatgttctttatcaagaaattgacagtaaagtaaaaaatgaattagcttctcaacgtggtgttacaacagaaaaaattaataatgcccaaacagcaacttatacgcttactttgaatgatggtaataaaaaagtagtgaatctaaagaaaaatgacgacgctaaaaattcaattgatccaagtacaatcaaacagatacaaattgtagttaaataataatttgaaaatagttttatagggcaagcgctgaaaaattggcgtttgtctttttagttattgaacttgtaaattattgttgtttgcttctcgtagtaacagattggcctatacaatagtaaattttatatgagtgtgtaccacaatttataatctaaacataacagcaaatctcaaatatctggaacctaataaatcccctcactactgctaatagtgaagggatttattttattacttagacgtaattataaatatatttgttctattgtagtcatggttaatcatatttacaaactatcatttctaaatcgcgcattatgaagtcaattttcataaaccgtcattatatttctggattcattattcagcttctctaatttcgtctgcaatatctttatagtcaatatttgctttagtgaaatctttatcttgaattggaaaatgctgttcaaatgtttctatattttggatttctactttaacatcttctacttcaaaatctaagacatgtccaccaaagttacgatcatcattcgcaaagtgtacatgaaatcctgctgatccgataccatggaataattctggtgtaaagaaaccaacgactgaacctttgacatacgtttcagtttgttcaggttgtcttctagctgaatcgattaaacgtgtataaggtggttcttgagccggcatcatacgtacatgcatttttttaaataagcctgaaatttttactgctgaaaataaattttcactcaacatcttttccttaatttctgcaaaaactgcttctgaagatttatctttcgtttcatagcttgtatctgctacaaatttagttacagttgcatatggtgttaactcgtcaccttttaattctacaaattctttatgttcatttgcatggtaagcttttccatctaaaaagattacctcaccgtttgaacctgttagtgtagcgatacctaagtcaccatgttgcaataattcatttattgatgcagttccttttaataatcctgccattaatgtgcctaatgtaccatgttggtataaaacattagtcataaaatctcccactcctctttaacatttatctttattttagttaaatacgtcaggtaacatatttgttgaaagtttgatattatctttgtaatttacaggtatatcaattaatactggaccatctgtttcatagccctctttaattgccgcttctaattcttcttgattagtaactcgtaaacctttcgcgccaaatgattctgcatattttacaaaatctacaggaccgaagtctacacctgacgaacgtttatatttcatttcttcttggaattcaaccatgttatattttccatcattccaaataagctggatgatatttaaatttttacgtacggccgtttctaaatcttgtgatgaaaataaaaagccaccatcgccagcaacggacacaacttgcgtattagggcgcacaagtgcagctgaaattgcccacggtaatgctacaccaagcgtttgcataccattgctaaataataaatgtcttggattgtaacttctgaaattacgtgccatccaaatatagtgacttccaacatcaactgttacagtagtatcatcagttaataccttttgcatagattcaataatttccactggatgtagaattccttcttcatgcgtcgctttaataccagtttcttcatcaatatgtgttcttaattgttctaattcgtctaaatgttgttgatttataaatggctcatccactttttcagaaatcatttcaatcgttttagcaatattaccaatcaactcttttttcggttgcatataattagtaatttcagcttgaacttcgtcaatattgataatttgtgtttctaattctttattccagttactagcttcgtattcaattggatcataaccgattgtaacaactaaatcacttttacgtaataattcatcaccaacttgattgcggaataagcccacacgaccgaagaaatgattttctaattcacgactaattacacctgcaccttggaatgtttctacaactggtaaattcgtgcgctcaactaatttgcgaatggcatttgtttcttctgcacttgaacttctcataccagctaataaaacaggaaatgatgcatttttaatcgcttcaatgacatcattaatatcttgttcactcggtactcctaaatttggtttttggcaaagtgatatagctttagattcaactggtgaagaaataacgtcttgcggaatactaataaaacttgcgccattttttcctgaagtagcaattcgaattgcatttgtcataacttctgataatgattcaggatcttgtacttcttcactatattttgatgaatattttaatagcgcagcattatcaatactttgatgcgttaatcgtaataaatcattacgtttcacttggccacctaacgctaatacaggatccccttcagatgttgcggttaataatccagtagttaaattacttacaccaggaccacttgtaacaagtactacacccggtttgcctgttaatcttccaataccttgcgccatcattgcggcgttttgttcatgacgagtgacaataagttcaggaccatcatcaattaaagcattaaatagatagtcaatctttgcacccggaataccaaaaacatattctaccccattatttttcaaagtatcaataaccatatcggctgcagtgtactttttatcagtcatttatattcatttcccttcaaatgtgatgtatagatgtgtattacatgtaattactttgtgatttgtaatctaatgatagttacgcaaaattaatgatgtttatcaaaattttacatgtacgattagatttgtaatacataaaaattgccttcagtacattatataacctttgttagatgaataaaaatcgttatttgtaatactaagtattccaaaaatgcatgaatagattttgtgcgttgtgattatgagggatgttggattgattgatgtagaggattgttacgatatttttgggatgtggtgtttagtcaatggcgggctgaaattgtcgttttatggtgggctgaaaatgctgttttatgtcgggcttgaatttgtcgttttatggagatataaaaagccacagcaagacttagatctaactgtgacttatacatttcatacttatatttatcgattggttttatagttataaatgatagaagcagttcctaaacaaattaagaagatactcattaaatatatagaaaagttatctgttttaatataaaacctaaaaagtagaaacaccagcatcgcaacaataaaataaacaggaataaaagctttcttccaaaatatagaatctttcaattaagtcactccttattttgataacactcttaaatcatggttcttgagttatcatctggttatcatccgatagctctttcccttgaatatctattattagaacactatcgtacggtctccgcaagctaaatgacaatttaataatgtacacttttgattgtgtaagcatgtacaaattatacgtgtaaatcaataattcatagttgaattaattctatacctgagacattaattcatttatactctattccatattccccacacaaacgcaaaaaaacacctcgacataacatcgaggtgttttgtatatatatcgtccgacaattaacgttttgagaattgaggtgaacgacgagctgctttaagaatttgtttttttacgttcagaaaattttagaatttcgcatgattatatagactgtcgtacaccttgatattaaaggatttcttcaattttgaatttcattgattttcatcaaattgaagcaaagggtattaacggggtattaattttttaaaaaaatctgctggtcggtggattcaataattgatcttatttactgtatttgacttctatacttttgaaaaaattttctatatcaactttatccatatttaaaatatctttattgaacacacaatgcaaatatggttttgcagaaaaaaagtattgccttcacttatcagttgataattaacatccttaaaatttaaataaataataataccatcattttctttggctaaattctttattttcgaagaagataaagaattaaactcctcattcacatgttgtttattatattctggtttaaaaaatgtaattaatgatatctctgataaatcaatatattctttattaggtatactttgctctaaaattctttttaatcgagacacagcctctttaccatattggtttgtaatataaatattgtcaggctgtatcttgtaaaatattaagacagtctttctattttctggctgataagtcataatttcttgtaatttttcatgacctttccctattctatcaatgacatttctattaccctctgtaccaaaagattgcccaatatataaattagtaatttttaatgtagtatcatctctgtttgtaaaatattcattatattttttataccccattatgttccaaacgtcttcagagaatacttttatcaaattatcactatatttataaacttcagagtaatatactttatccaatacaacgttttttttatattgttcaaatacttttgagtacatactacaatcatcagatatttttttatcatacgaggatattaaactttctatttttttatgaattaacaatttttgaacatttaattttttaaataattcatcaatatattttttccatacttctttgaaatttatttcattttctagatatttcattaaaatttcattaaaactatctaagctctctctatattctgatgattcgatttttgtattgaattcttctttaacatagttagaagaaaaaacaatttcaaatattggtttaataaataaaatataaaaaccatactctacatcaaacttgttttcgaataaatgttttacaattttctccaattcaccacttaagtatacctcaatattgtaaccattaattttatacttcaaatcatcatctcttatatcatttaattcaaatatatctcttctgaatataatattctcatgtatatactttgaaatgtcaaatatacaatctttatttgttttcgtatttaatatagatattcttcctctatcaagtaatttcattgtatattcatctacatagttgaaggaatataaatataaaggtagcttagattttaagaaaaattcttcttccttcattttataaaagtcttccattgttattattttagtacctattaactctacatttaaaaaattactattattcatttaatttacctttatatattaattaaattttaaaattattaaactcttaacttatactacttacaaccttacatagatagtactttattaatagataacttatactaaaaaaatataaagcatataaattaatctataatatccgtattaaataattcatcttcaaaaattattgtataaatatcatttgttattattttctttaaatacctaatgttatcgatatctatttctgtctctttatatttctctaacaagttatatgcggtaactattcttttttctttttcatttagagatgatagtatttcatttaatttattttctattactttctgcttttcttcctgtgttaaatataaaaatttaatacaggaatctattctagaaaataccggttctccaatattaactattgcttcttcaatactattaaaattagatgttagaatgaaaatacaatttgaaacgtctactttataattggcatcttcaataataccttcatcaaacatttgatagaaaacattgtaatagattggtaataccttatcaaattcatcaattaaaacaacattagtttcacgatctactaaatcttttgacaatgatactttggcatgttcatctccaaagatataattaaaagattcatcattctgcatcatagaaaattgtattctagtgatattacctttatatttttttgctatttctttggctaattctgtttttccaacacctgatggaccatagtaaagcattacggtcggtttattattttctaaggaagtatgtttatataaatctatgctcatttgttttttagcgtctgtttgacctattattttagaaccagccatctgctctttataaaaatttattacatcatctttttttaatgttgtatattcatagtttatttctattatttcagaatcgtgaaaactatttagtgattgaaatactctttttggaggattctgaatatagattttcttaatatttctacctaaagtaacgatatttataaaattagtaataacatgagttgttacagaagcaaagtcgtttgaaaatatcacaagattttctatctcagtatcaaaaataccatcaacatcatgagttccaaatgtatcacttgctcgcactatgatattgtattctctgattaattccatgaagcggtgatattctttaacttcagaattaatatattcattaaatccacaaagcggtcccgtataaacatgaatttccatttatttcactcctgcaagaataacatcatacacttgatatttatcttctttagttgcttctgatctaattcccttaaactttccaattccactaggtttggcaccttgatttagatcaaactctttatcgtaatttagattttctttgcttatttcaccaacaagtactgagtagagtgttaaattcataaattttaaatcttgtattctatagttatttttaaaagattctatattaaatctaaaaactctgttttcattccctcttgttcctattaattcaaaatagcctttaatacttctaatcgcttcattcatttttgaaacatcaaatgatagctcctcctcgtctagatgtttagatccttcaaacatacttgctatgggggtaatagtcgcgaaatatgtcatcgtatcttgttgaatatttagtttaaacccctctgaaatatcaataatagtttttttctttctaaactctactgtatccaaaaaatcatatattaatgtattctctaaaattgttttggctactcgctctccagttatatttccatttatacctgcactagccgaagcactcgctgacatcccaagtaaagaatcaaaaatttgttttacagcgctttgcttaccaaattccatgttcactttagattcaccacttgcactacctttttcatcatgcatcaactgaactgttttagtaaggttacctttcttctctatctgtaataaatccattgctgatagttcatcaaaataaattatttttttgatagtatttgtcaatatatcctctccttaatctaatacttcaaaatctggtaatttatctattaatccaagagttttcatacttacagtaataactgataaaagcagatttaaaatgtaattcggatcttcactaaattcattaggatcatctaatattccagatttcttgtcgatgcttacgttgtactgatctataatccattcaatagcaggcttgccattcacaatataattatatactttatttggaatgttagtaactgtaatatcggtattgtatattactgtatccaacacgccctttttagggtgcttcatttttcaactttataattcggattcatattattataaattatttctacaccatcccaattgagttgtttttcataatttaaatgtaattccactaactccctaccaatttcaacaaatccatatacatcctttaatatcggtattcgcggaaaacctttactcaaatcacttgaatatttgttcacataatatttatgatgcaaaattgcatatatataatatactatctcttctgaattaagatttattttctttttaaaagaattagaaatattatctacaagcctcaaactatctttacctttgtatgtagcaaagcctttgccattaccaataaattggaaattaggtaatatgtccgtgatcatagccgagaattctttattcattccctgtccttgtatataaatcacctgtccagtattctccattatattataatatctacttggcatttccataatatttttgtcgtacactatccatttttttgtaaatggtctatgcataaatttaacaattctctctggattaattgaaatattttttcctttagaaaatttttgggtaagtcctcgtgtccaactaataaatgtttcatctttgttcactaaatttatacgttctcttgaatctaagatatcaattaatctatctatttcagaattatagttatctacaagtaattttgcatttactaatgctttttcattcgaaaaatttgttacccaattatctcttgctgaatttactccattaaattgatctaaatatatagaattttcaatatccttggaatcatacattggtaaataattctcatagtttatgtctcgttgattaatccaatcattgtttttatcgggtaaaacattcaaacttttcaaattcacaattgattgatgtttcattaaagtatctaatttttgctctctagttaaatattcaccaatgtcattataatagatatcgtgattgtaacttccatctttaactaaaatagatatagctatcggtgctctacttcctgatccaaatatttttccaccttcttttcttgatttttcaccctgtgttcgttggtcgcctctcaaattaattatgtacagatagttaaattcatcgtataaaacttttctaaatccatcagtgctttgactatcaataaatgatccatttgttacaaatcctataataccttttttccaactctatcagttgcccatcgaaaagcctgtatatacgaatcatataatgatttttttaaatttgctgttgaaaaatttgcataggtatttgctatttttgcatttaatttttcatattcatttttttattatcattatttacactagattgaccagcagaatacggtgtatttccaattatgacagtaatattttctttttgttgtttttttaaccttttatcgtttagagtaaagtattcaaatcacttcacttccaaaaaaataacagaatatcaactatttattgttctccacatttcatggttcttcatcttttatggtgggaaggtaaaaattcatttatattctacacattccatattcgccgcaaaaacgcaaaaaaacacctcgacataatatcgaggtgttttgtatatatcgtccgacaattaacgttttgagaattgaggtgaacgacgagctgctttaagacctggttttttacgttctttcatacgtgggtcacgagtaagtaatccagcgcgttttaaagaacctctgtattcaggatctgcttctaataatgcacgagcgattccgtgacggatagcttgagcttgtccagtgaaaccaccaccatgaacgttaactaaaacatcatagttacctttagtttcagttacatcaaatggttggtttaagtctaaaattaatgattcgaatggtaagtattcgcgtacgtcacggttattaactgtgatgttaccttcacctggtactaaacgtacacgtgctactgagtttttacgacggcctgtgcctctatattcaacttgtgccaaagtcatttcctccttctaattaaccacgtaattcgtagttttctggttgttgtgcagcgtgtggatgttcagcgccaccatatacaaataattttttaccttgtttttcgcctaaacgagtgcttggtaacatacctttaattgagttttcaattaaacgttctgggttagttcttcttaattcaccagcagtgattgatttgataccacctgggtgatttgagtgacggtagtaaactttgtcagtttctttgttaccagtaaattcgatttttgatgcattaataacgattacataatcaccagtatcaacgtgtggtgtgtaagttactttatttttaccgcgtaagatagatgctacttctgatgataaacgacctaatgtttggccttcagcatcgataacataccatttgcgctcaatgtttgattcatttgccataaatgtttgacgcataataattgtcctcctaaaaaataaatgcttctattcaagctataaacagtttcataacctaatagatgatttcatttgtttcatttttaaaacgtttaatttcatttattttgttaactgttgttcgtttctgcttatatatcttgtaacacaataagtttccggggcttatcgtggggtggatataaaacaataccgttaataatcttataatttcacaagctttttgtcaatggcaatcagtcattttgtaatgattttttacgatgtattttgatatcgttaccaaagtcttttaataactcattttcatctaaataaattttctctaaatataatccttcagccggtgcagtgaaaggtacattcttacgattctttgattcaagaagttttggtacatcagatacttcatgtcgcccttttccaacttctattaaaaatgcaactaagacacgcaccatgttatataaaaatccagatccagtgacaatataatcaaagccatcatctgtctttacgatttcactttggtataatgttctaactttgctttctacttcagttttttgcgaacaaaatcccgtaaaatcatgtgtacctatgaattgttgcgccgctctgttcattttacctaaatccaacgtttcaggaataaatgttttcaaaccactttgaaatggatcgcggtgttgtgcttgatatactttgtagcgataacgtttacctacacaatcataacgacaatgaaaatcgtcatcgactgtaactacattgttgacataaatatcatcaggtaacgttcggttcattgcatattgccattgtgacataggtatattcagctctgtgtcgaaatgaaagtattgctgtatcgcatgtacacctctatcagtcctacttgaaggatggattctcacatgtcttttatgcatgcgttgtaatagcttttcaaattgttgctgtaccgttcgaccattttgttgaatttgaaaacctagaaaattatttccttgatacgcaatttctactaatatacgcatgaatttacactcctgaatattttaatacgaataaaataattgcaattgggataatcatggttaaagatatcgtatctctcaattgccatttaagctgtctgtagctcgttctcttaacattggcatcataacccctaacttccattgcgaccgctaattcttcggcgcgttggaaagctgagatgaatagtggcactagtaatggaacaaatgatttaatacgtgttgcaatgttccctgaacttatttcagaaccacgcgacttttgcgccaaaatgattttatctaactcatccattaacgtcgggatgaatcgtaacgcaatggacattatcatacttaattgatgaactggtaatttaaacatctttagtggtgcaagtaatctttcaaacgcatctgttaaatcaattggacttgtagatagtgtcataattgttgcaatcattacaatcccaattaaacgcagtgatatatatagcccttctaaaataccattagtttcaatcgtgatgccatgccattcaactaatacatatccacctttagttaaaaatatatgcatcattaatgtgaagattaaaaagaaaaatattggtgttaaacctttgattaggaaccataattgaatttttgctaatctcataatgaataagataagtgcaaacacccaaagatatgttaatggtgaatgacagaaaaatattaatataataaaaagaaaaacaaacattaactttgctcttggatcaagatgatgaacaaaagaattaattggtaaatatcgccctataatcaatttatttttcatgttgccactccttatacaagcttacaaatgcttcttcagttaaggcaatatcttttaattttgtttgatatttttgttcaaagtcatattgtaactgaacaatttctggcaaaccaatatgccaatccgccaatttttttttatctttgaagagctcttttggtgatgtttgcgacactatactaccttctttcataacgatgacttcatctgcataacgcgcgacttcattcatatcatgtgaaattaggataattgccttattttcatctgtttgtagtgactttagtaatctcattacttgtcgtttactttgtggatcaagtcctgctgtaggttcatcaaccacgataatatcaggattcattgccaatatcgatacaatcgctattttacgcatttgtccacctgacatttgaaatggtgattgtgacattagatctcttgaaaagcctaaatccatcaacagacgatgggcatagtttttggcttcatctaaattcattttaaagtttttaggtccaaatatcatttcacgctctactgtgtcctcaaataattgagattcgggaaattgaaataccattccaattctttttcttacaggtctaatatatttatctttggtcttatgtgtaatagtaatgtcatcaactgtaactgtcccagtagtcggctttaacagcgcattaatattttgtatcaacgttgatttaccactacccgtttgtccaacgatggcgtaatatttaccttgttcaaattctgtattaacatcatgaatagcttgatgctgatatggtgtccctttttgataggtataacttacattgtcaaaccgtatagtcatagttgatccaccagcccttcataagttaagaatgatgtttggtgtcccagcatttgatttattttgattgggaatggcaaatctagacctattcttgttaactcttctgcattgtcgaaaatttcagtcgctgtgccttctttatagacagtccctttattcataacgataacatgatctgcttccatcgcctcagataaatcatgcgtaatagaaatgattgtaatattatgttctgatttaacttttctcactaaatccaataaattttgacgtgcatcaggatctaacatagaagtcgcctcatctaatataatgacagaggggttaagtgctaatacacttgctatagccacacgctgcttctgtccccccgataatgcattaggttcataatctgcacgttctaacatatcaacttgtttaagtgcttcgctgactcttctatgcatttcgtcatatggaaccgcatgattttcgagtccaaatgccacatcgtattttacaattgaaccaacaaattgattatccggattctgaaatacaattcctatgtcttttcttaacttttcaaaattatcatcagttatagcttgattattataaaaaatttctccagatttaactttctctatgccaatcattaacttggcaattgtagattttccagaaccgttatgaccaacaatagatgtccactgacctttaggtatattaaaagaaacatctttcaatgtgaaggatgcatcactttgatattgaaatgaaacatttttaaatacaataactgaattcttatcctccacttgtctctctcctttacgattcgtgtatctatcatattttacaatatttataaatcgctgtatatgacattgactgggttctctatatattactagtattttctgactcatttctagtctttaaagtgttgtttaacaactaatgataaggacttttattcctctctaacaattatgtataaacgttaataaaataaatgatttactaatataggggtggtcgcgtttgattcaacgataatactttcacttcattcagttctagtgaaattgatcaaactagcttcatcatatttttagattcgcactcaaaaaagtaaatataaagaaatcggacttaaaaacatttctgttcataagtccgatattttattcaataaaaaagcgcgcaccccatcataagtttgttgagttcacgctttaaatctttatttagttgatggggtactctgagctagacaatatttgtatgtggcaaacattatcgttgcactcatttgctttatataaaagtagttagtgtatttatataaattcttatactaattcgataattactgattcagcaccgtcaccgcgacgagggccttgtttaaggatacgagtgtaaccaccttgacgttctgtgtaacgctctgcgatttcaccaaataatttttgaagtgcagtttgtgtagtttcatcttcgtttaagatttcaacattacgtaaagttttagctgcattacgacgagaagctaaatctccttttttacctaaagtgattaatttctcaacaacactgcgaacttcttttgcacgagcttctgtagtttcaatacgttcactaataataagtgatgtagctaagtcacgtaacatagctttacgttgatcagaagtacgacctaattttctgtaacccatgagttaacctcctttatcaatcttcttttcttaatcctaatcctaaatcttctaatttgtatttaacttcttctaaagatttacgacctaaattacgcactttcatcatgtcagcttcagatttgtcagctaactcttgaacagaattgattcctgcgcgttttaagcagttatatgaacgtacagataagtctaattcttcaatagacatttctaatactttttctttttgatcttcttctttttcaatcatgatttcagcgttttgcgcttcatcagtaagaccaacgaagatattcaagtgttcagtcattatttttgctgctaatgaaactgattcttgtggtgtgattgaaccattagtccaaacatccaatgttaatttatcaaaatcactgctttgacctacacgtgtattttcaacagtatagttcacacgttcaacaggtgaatacaatgaatcaacagggattacaccaattggtaaatcactagtattattttgttctgctaatgcgtaacctctacccttgttagcaactagacgaatttttatgtgaccacctttagatactgttgcaattttaagctctgggtttaaaatttcaacatcactatcatgtgtaatgtcgcttgctgttacttcgccttcatcacgtacatcaatttctaaagttttatcttcttcagagtaaattttcaatgctaattgtttaatgttcataataattgtagaaacatcttcaactacattgtctactgctgagaattcatgtaaaactccctcaatttcaatatacttaacggctgcacctggtaatgaagatagtaggatacgacgtaaggagtttcctagtgtagtaccgtagccacgttctagtggttcaacaacgaacttaccgaatttagcatcttcactaatttcaattgtctcaattctaggtttttcgatttctatcatttaaatatcctccttatatacgtcgacttaatttaaaatgtttgctcagtgacctgtaacaataccatcataaattatacacgacgacgttttggtggacgacaaccgttatgaggtactggagtaacgtctctgatcgcagttacttctaaacctgcagattgtaatgcacgaatagctgattcacgacctggaccaggtcctttaactgttacttcaactgtttttaaaccatgctccatagctgatttagatgcagtttcagaagccatttgtgctgcaaatggtgttgattttttagatcctttgaatcctaatgcaccagctgatgaccatgataaagcattaccgaactcatcagtgatagttacaatagtgttgttgaatgttgaacggatgtgtgctacaccattttcaatattctttttcactctacgtttacgagatacttgtttacgtgccatttaaaatttgcctcctttacctattattttttcttgttagctaccgttttaactggtcctttacgagtacgcgcgttgtttttcgttttttgaccacgaactggtaaaccacgacggtgacggataccacggtatgatgaaatttccattaaacgtttgatatttaagttagtttcacgacgtaagtcaccttcgactttataaccgtctacaacttcacggatgcgacctaattcgtcatcagttaaatctttcacacgagtatcagctgatacgttagcttcttcaagaattttttgagcagttgacgtaccgataccgtatatataagttaatgagataactacgcgtttttcacgtggaatatctactcctgcaatacgtgccatattaatttacacctctcttttattaaccttgtctttgtttgtgttttggattttcacaaattaccattactttacctttacgtttaatgactttacatttttcgcaaataggttttactgatggtcttactttcatttttatacctccctatattatggagtgacgattatttataacgataagtaattcttccgcgtgttaaatcgtacggagacatctcaacagttactttgtcgccaggtagaatacgaatgtaattcattctgattttaccacttacgtgagctaaaatctcatgaccattttctaattctactttaaacattgcgttcggtaaagtatctaatacagtaccttctaattcaattacatcttgtttagccattgattaacttccccctttttgcaatagtaaggtaatcgtcaatagacaactttattgttacgaatctatcagtgattaattttataagttaaacaaaaattacgggaattaattatcgttaattgccactctcatctatctaatatgattaaatcatgcctcacttaaaatagaccgctaaaagttgatctattacaaatgatctaaaatatcaatgacatctttggtaacgtcgctaatatcttttgaaccatcaatatttttcaatacacctttttgatcatagaaatctaaaataggcttagattgtttaatattaacactcaaacgattagctaccgtttcaggattatcatcttctcgttgatacaatttaccaccatcgatatcacaaataccttcgaccttcggaggattaaatacaagatgatacgttgtaccacatgactcacagattcgacgacctgtaagacggttcattaattcttcttccggaacttcgatattgatgacagcatcaatgtttctgtcaagctcagacataatattatttaatgcctcagcttgctcgattgttcttgggaagccatctaataaaaagcctttttttgcatcgtcttcagaaattctttccttaacgatacctacagtcacttcatcaggaactaattcgccacggtccatataagacttagcttctttacctaattcagtttcttcttttatagcttttctgaacatgtcaccagttgaaatgtggggtattgggaatttcttgacaatttcacttgcttgagttcctttacctgcgccaggtaaacccatcaaaatgatattcataagtgccctcctaaaattatctaccaccaaagcctttatattctttttgagatacttgagcttctaaagatttcattgtttcaatcgctacaccaataacgataagtaaacttgtaccaccaatctgaattgattgtggtaatcccataaacttagttgctaatatcggtagaattgaaataacggctaagaagatagaacctacaaaagttaaacgatataaaactttagtaatatattttttggtttgttcaccaggtctaatacctggaacatagctaccttgtttcttaaggttatcagccattttttccggattaacttgtacaaatgcatagaagtatgtgaatagtataattagtacaatatatacaaccataccaacattacttgaaggatttgcagcattcgcaatgttttgtgcccattctttatctggatagaacaacgttaatgttctaggcagtaagaagaacgccattgcaaagattacaggaataacaccggctgagttcacttttaaaggtagataagttgcctgtgaacctaatctttgagcagtttgtttcttagcatattgaatcggaattttacgaacggcttcaagtacataaatagcacctacagttaatagtatcagtgacactaaaagtcctaatactttcaaccatgctaatgatgtatcttcttgcccaacgaacgcagtttgtccaaattgaattagactggctggcaacgttgataaaatacccgcaaatatgataatagaaataccattaccaacaccgaactgagtgatttgatcaccaagccatattaagaaagcagttcctgctgtcaaaactagtgctattaataaataactcataattgactgattgataatcagcgcacctttgagataattattaaattggaatgccatacctatagattggataaatgctaaagaaattgctaaataacgagtaacgttatttaactttcttctacctacttcaccttgttttgcccattctgagaatttagggacaatatccatttgtaataattgcattacgattgatgcagtgatgtagggtacaatacccattgcaaaaatagaaaatcgtttcaaggctccgccaccaaaagtatttaataactcagtggcaccttgagaaccttggtgattatcaaaagctgcaggatttactcctggagctggtatataagtccctattttaaaaattactaacattgctagtgtgaagaaaatcttgttacgaacctcttttgttctaaagaagttcacaagggtttgaatcattagatcacctcgtgtgctccacctttagcatcaatagcttctgctgctgaagctgagaatttatgagctttcactgtcaatttcttatcaagtgaaccattacctagtattttgataccagatttttcattcttaacaacaccagattctactaataaagctggagttacttcagtaccatcttcaaatttattaagttggtctaagttaacaatagcatattctttacgatttatgttagtaaaaccacgttttggtaaacgacggaataatggtaattgaccaccttcaaatcctggtcttacaccaccgcctgaacgagctttttgacctttgtgtccgcgaccacttgttttaccgttacctgtcgcaacaccacgtccaacacgattgcgttctttacgtgaaccttctgccggttttaactcatgtaatttcatttcggcacctccttgattatttttcttctactgttactaagtgcttaactttgttgatttgcccacgaatagcagggttatcttcaacaactactgaactgttagtctttttaagacctaaagcttcaacagttttacgttgtgtttcaggacgaccaataacactacgagtgagggtaatttgtaatttagccataactagttttccctccttaattgtataattcttctactgttttgccacgtaatttcgcaacatcttcagcatttttaaggttttgtaaaccatcgattgtagcacgaaccatgttgattggtgtgtttgatcctaatgatttacttaagatatcagtgatacctgctaattcaagtacggcacgaacaggaccaccagcgataactcctgtaccaggtgcagccggtttcataaatacgcttcctgaaccgtaacggccagtaattgtgtgtggagttgtaccttcaacacgtggaacaactactaaatcttttttagctgcttcaacagcttttttgattgcttctggtacctcttgagctttaccagtaccgaaacctacacgaccatttttgtctccaactacaactaatgcagtgaaacggaaacgacgaccaccttttacaacttttgctacacggttgattgtaacaacgcgttcttcaaattctttcgtctcttcttctctacgagccatgtatttgtccctcctttaaattaaaattctaatccgctttctcttgctgcttcagctaatgctttaacacgtccgtgatataaatatcctccacggtcaaatacgatttctttaatgcctttgtcagcagcttttttagcaattgcttcaccgactttagttgctaattcaactttagttgctgtagtagcaatgtcgctgtcttttgaagaagcttgagctaatgttacgcctttattatcatcaataatttgagcgtagatatgcttgtttgaacgatatacgtttaaacgtggcttttcagctgtacctgataagttagtacgaacacgagcatgtctttttaaacgcactttatttttatcaattttactgatcatttcaatactcctttctttagagtttatctattatttaccagttttaccttctttacggcgaacgtattcaccttggtaacgaatacctttacctttgtaaggctctggaggtcttactgaacggatgttagatgctaatgctccaacttgttcttttgaaataccttcaactttaacgactgtgtttttctcaactgagaaagtaatgttttcttcagctttaatttctactgggtgagaataaccaacgttaaggattaagtctttaccttgcatttgagcacggtaacctacaccaacaagttcaagtacttttacgtatccttgagaaacaccttgtaccatattgtttaataaagcacgagttgtaccatggtttgttctatcttctttagaatcagatggtcttacaacttcaattgtgttttcttcttgtttgaatgtcattctttcatttaaagttcttgataattcacctttaggacctttaacagttacatgatttccatcaaaagttactgttacgtcactagggatgtcaataattttcttaccaacacgactcatgttatggcacctccttattttttattaccaaacgtatgcgataatttctccaccaacattacgttttcttgcttctttgtcagtgattacaccttcagaagttgatactaatgcaatacctaaaccatttaatactttaggcatttcgctagcttttgcataaacacgtaaacctggttttgaaatacgttttaatcctgtgataacacgctcatcgttttgaccatattttaagaataaacgaagtacaccttgtttatcatcttctacgtattcaacatttttaatgaaaccttcactctttaagatttcagcaatttcttttttaatatttgatgcaggtaattctaacttctcgtgacgcaccatgtttgcgtttcttacacgagtaagcatatctgcgattggatctgtcattgtcattgattgttgcctcctttcagactcttttttattaccagctagctttacgaacgccagggatttggcctttgtaagctaattcacggaaacaaatacggcataatttaaatttacgatatacagaatgtggacggccacaacgttcacaacgagtgtattcacgaactgcatatttttgttttttttgttgcttagcaaccattgaagttttagccacttaattagcctcctttaaataattatttacggaatggcataccgaagttagctaacaattcacgagcttcttcatcagtgttagcagtcgttacgataacaatatccattcctctaactttacttactttatcatagtcgatttctgggaaaattaattgttctttaacacctaaagtgtagttaccgcgtccgtcaaatgcttttttagaaacaccttggaagtcacgtacacgtggtaatgatactgaaattaatttgtctaagaattcatacattctttcaccgcgaagtgttactttcgcaccgattggcataccttcacgtaaacggaaagtcgcgattgattttttagctttagttactaatggtttttgaccagtgatcaattctaattcttcaacagcattgtctaatactttagaattttgtactgcgtcacctacacccatgttcacaacgattttatctatttttggtacttccattactgaactataattgaattttttcattaagttttcagtaacttcagtgttaaacttttcttttaaacggttcaaagtgggatcctcctttcaacttgttattaattattagatttaatttcttcgccagattttttagcgatacgaacttttttaccatcaacaaatttgtaacctacacgagttggttcgtttgttttagggtccaataattgtacattagaaacatggattgctgcctctgtttctaagattccaccttcaggatttaattgagttggtttttggtgttttttcataatgttaacaccttccacaacgacacggtcttttttaggtagagtagcaattactttaccttctttacctttgtctttacctgcgataactttaacgttgtcaccttttttgatatgcatgtgggcacctccttatttgtattggttgttattaattaaagtacttctggtgctaatgatacgattttcatgaagttaccttcacgtaattcacgagcaacaggtccgaagatacgagtaccacgtgggcctttgtcatcacggatgataacacatgcattttcatcaaatttgatgtatgaaccgtcattacgacgaacacctgacttagtacgtacgattacagctttgacaacgtcaccttttttaacaacgccacctggtgttgcatttttaacagtacatacgataacatcgccgatgtttgctgttttacgaccagatccacctaatactttgattgtaagaacttcacgagcaccagagttgtctgctactttcaagcgtgtttcttgttggatcattagttaaacctcccttatctctaaacttgtattaaataattactgactcttcaacaatctctactaaacgaaaacgttttgttgctgataaaggacgagtttcttgaattttaacaatgtctcctaatttagctgaattgttttcatcatgagttttgtattttttagagtattttactcgtttaccgtataatttgtgtgttttgtaagtttcaacaagtactgtaatagtcttgtccattttgtctgaaacaactttacctacataaactttacgatcgtttctttcgctcacttttgtaacctcctcttacttaattattgattagccttactttgttcaatttctctttcacgagcaacagtttttagacgtgcaatcgtttttcttactgtacgaatacgtgcagtttcttctaattgacctgtagctaactgaaagcgtaggttaaaaagctcttcttttgaagatttgatttgttcttcgatttctgaagtggttaagtctctaatttccttagctttcatttgtttcaccacccaattcctcacgttttacaaacttagtttttactggaagtttgtgacttgctaaacgtagtgcttcacgcgcaacttcttcagaaacgccagcaacttcgaataaaattctacctggtttaacaactgcgatccagccttcaaccgcacctttaccagcacccatacgtacttctaaaggttttttagtatatggtgtatgtgggaagattttaatccaaactttcccgccacgtttcatgtaacgtgtcattgctatacgagcagattcgatttgacgagatgtgatccaagacgttgttgtagcttgtaaaccaaactcaccaaatgttacgtagttaccgcctttagaacgaccagttgttttaggacgatgttgacgacgatattttacacgttttggtagtaacattattattttcctcctccactagtgttcttagtaggaagaacttctccacgataaatccatactttaacgcctaatttaccgtaagtagtgtcagcttcagcgtgtgcataatcgatgtcagcacgtaacgtatgaagtggaacagttccttctgaatattgttcagcacgagcgatgtcagctccgcctaaacgaccagatacttgagttttgatacctttagcaccaagtttcatagctctagtgattgcttgtttttgtacacgacggaatgaagcacggttttctaattgacgtgcgatgttttcagctactaaacgagcgtcaagatcaacttttttgatttcaattacgttgatgtgtacttttttatcagttaacgcatttaatttgttgcgtaatttttcgatttctgaaccgcctttaccaattaccataccaggtttaccagtatgaattgcaatgttgatacggtttgcagcacgttcaatctctacgtgagaaactgatgcttcttttaattcattatcaataaatttacggatttttaaatcttcgtgtaaaagtgaagcgaagtctttttcagcataccatttagcttcccaatcacggataataccaacacgaagtccgattggattaattttttgacccacagtattccctccttaaaagttaattaagcttctttagcttcttctttaccgtcacttacgacgattgtaatgtggcttgtacgtttgttaatcgcacttgcacgaccttgcgcacgtggacggaaacgttttaatgttggtccttcgttagcatatgcttctttaactactaattcatctgtgttcatgtcatagttatgttcagcattagctaaagcggacattaatactttttcaattactggtgatgaagctttgtttgttaattttaaaattgcaatagcttcagcagcatttttacctctgattaagtcaagaactagtcttactttacgaggtgcgattcttattgttctagcaaccgcttttgcttccattaggatgtcctcctctacttaatagatattatcttcttgttttcttgtcgtctgcaacgtgtcctttgaatgtacgagtaggagcaaactcacctaatttatgacctaccatatcttcagttacatatacaggtacgtgtttacgtccgtcgtatactgcaaaagtatgtccgatgaaattagggaaaattgtagaacgacgtgaccatgttttgattacttgtttcttttcgcttccttcttgagcttcaacttttttcattaaatgctcatcgacgaaaggtccttttttaatactacgagccatttgggcgcctcccttcttattatgtgcgtgcagctttaagccgcacacccaaataagttgattatattattttttcttacgtccacgaacgataagtttgtctgatgattttttaccacgacgagttttcttaccaagcgtaggtttaccccatggtgacattggagatggtctaccgataggagcacgaccttcaccaccaccgtgtgggtgatcgttagggttcattacagaaccacgaactgttggacggatacctttccatcttgaacgtccggctttaccaacgttaactaattcgtgttgtaggttaccaacttgaccgattgtagcacggcaagtagataagatcatacgaacttcaccagatcttaatctgattaatacgtatttaccttctttaccaagtacttgagcacttgcaccagctgaacgagcgatttgtccacctttaccaggtttaagctcgatgttgtgtactactgtaccaactggaatgttttgtaatggtaatgcgttaccaactttgatgtcagcttcagcaccactttcaacgatttgacctacttctaatcctttaggagcaatgatatatcgtttttcaccgtctgcatatacaactaaagcgatgtttgctgagcggtttggatcatattgaatagaatcaacttttgcattgataccatctttgttacgtttgaaatcgataacacggtattgacgtttgtgtccaccaccatggtgtcttacagtcaatttaccttggttgttacgtcccgcttttttcggtagcggttttaataatgacttttcaggtgtagttttcgtgatttctgcgaaatctaacgaagtcatattacgacgaccatttgttattggcttatactttttaatagccattgtcgcttacctccttaatggtaattgttttattagttaaataagtcgattgatccttctttaagagttacaatcgcttttcttcttttgtttgtatagccttggtaacggcccatacgttttttcttaggtttgtaattcatgatattaacacttgcaacttttacgttgaagatttcttcaactgccatttttacttgtgttttgttaacacgagtatcaacgtcgaaagtgtatttgtcttcagccattgcttcagaagatttctcagtgattacggggcgcttaagaatatctcttgcttccattatccgagcacctcctcaacttttttagcagcagcttcagtaattactaagctgtcagcattagtgatatctaaaacatttaaaccttgagcagttgtcacttgaacgccagggatgttgcgtgctgataattcaacatttacatcttcgttttcagtaactactaatacttttttaggttgttctaatgtagataatacatttttgaattctttagtttttggagcttcgaagttgaatgcgtcaactacagttaagccattctcttgagctttgaaagataatgctgagcgtaaagctaaacgacgcattttcttaggcattttgtatgcataacttcttggagttggtccgaatacgataccaccgccacgccattgtggagcacggattgtaccttgacgagcacgacctgttcctttttgcttccatggtttacgtccgccaccgcttactgctgaacgattcttaacagcatgcgtaccttgacgtaatgaagcacgttgtaaattaatagcttcgaataaaacgctattatttggctcaataccgaatactgcatcgcttaattcgattgaacctgatttagttccgtctaattttaaaacatcataattagccattatgcatttcctcctttcacttcttattatttattaccttttttaattgaagttctgatttctactaaaccttttttaggtccaggtacgttaccttttactaagataactttgttttctgtgtcaacttgaactacttctaagttttgaacagttacagtgtttccacccatacgtcctggcattttttggcctttaaatactctagaagcatctgaagccatacctacagaacctggtgctctgtggaaatgagaaccgtgtgacataggtccacgagattgtccgtggcgtttaattgcaccttggaaacctttaccttttgatacgcctgttacgtcaataacgtcgccagctacaaaagtatctactgagacttcttgacctacttcgtaagcatccacgtctacattgcggaattcacgaatgaagcgcttaggtgctgcgtcagcttttttagcgtgaccttcagctggtttattagcatatttattagattttgcatcttttttgtatgcttttttgtcttcaaatccaacttggattgcgttgtatccatcaacttctacagttttcttttgtaatacaacattttctttagcttctactactgttacagggattaattcaccgttttctccgaatacttgtgtcatcccaatttttcttcctaagattcctttggtcatcgaaagtccacctcctaaaattgtctattataatttgatttcgatgtctacaccagatggtaagtttaagcccattaaagcgtcaactgtttttggtgttgggtttacaatatcgattaaacgtttgtgtgtacgttgttcgaattgttcacgtgaatctttatacttatgcacggcacggatgattgtgtaaactgatttctcagttggtaacggaattggtccagaaacatctgcaccagaacgtttcgctgtttctacaatcttctctgctgattgatcaattacgcggtgatcataagcttttaatctgattctgattttttgttttgccataattttccctccttattcgtctacatttagtgatagacttctccacgaaaactatcttacacagcgccatggcaaagcggccgggtgtgtcagtaacctttcgcttcatcgcttttcttaaagtccaacgttagttatattacacgaaaaacatcgataaatcaaggcttttcacataatttttctatctgtctaacacatacttttatattttactttatatacttagtcagttcaactattttcgagatattttttatttccttctttattgtaaattcgtaccttgaatcattttattattatcattgaaaattattctatataattagtcataagaacggtggtgaatgaatatgaaaaatggaccaaaattatctttagcacttataggtatctttttaatactttgtgagtttttctatggcattccttttttaggtgcaacgtttattttaagttttggatggcagcctttactctttaatgcattactttatctaattcttactattatattattagtgaatagacaaaatgcgattagacctatagcgattattccaatatttggtatagtaggtagttttttagctattatccccttcttaggaattttgattcattggattttatttttcctaatgattctatttgtcctagttgtattatcaacgccaacctatatacctaataaaaatgctcgtgtcatttacacacaatacaaagatggacatagagaataattcttaaaacctttttaattaggtatataatatagaagaaacacgtccaacaattttaaaagaagtatatttatatcggatatttaaagacattcataatatcgctttatgttatttcgcttcttattttatccttacttcaaagaaaaaaacgactaccaatcattggcagtcgttttttgtgtctggatttaaccatgaacaaatatgaagtacagaatgaatagtaccattaatacatacattatcggatgtacttctttatgttttttagagataagcattgtaattggatagaaaataaatccacacgcaataccagttgcaattgaatatgataaaggcatcataatgattgtaatgaaggctggcactgcaacttcaaaacttttccagtttatctcagcaaagtttgcagccattaatacacctaccaccactaaggctggtgtcgtaactgcacttgttacaacagcgattaacggactaaagaacagcgctaataggaaacaacaacctgttacgatactagcaaatcctgttctagcacctacagcaacacctgaagttgattcgatataagaagttgttgtagttgttccaaaaactgatcctacaatcgtagctaaagaatctgagaacaatgctctaccagctcttggtaatttattatctttcataatacctgcttgagtagcaacagctactaatgtaccagctgtatcaaagaaatcaataaataagaacgttaaaataacaattaagaactgtatcgttaataattgactggggtctttaaacgcttcaaatgcagcaccgaacgttggttcaatacttggaatcttacccacaataccagatggcatttgaatcaatccagtgaacataccaacgattgctgtgatgatcataccgataaagatagaacccggcaatttaattgcatataaaataactgtaataacgataccgaatatcgccaaaagtactggtggatcagttaaatgtcccaatgttactaatgtggattcatttttaactataatacccgaactttgtaaacctacaaatgtaatgaataatcctataccagctgaaacagccatcttcatttgataaggaattgcattaataataacttccctaaaccctgtgacggttaatatcgcaaagaatatacctgagaataaaacgcctgttaaaccaacttgccaaggaatacccatggttaacacaacagtaaatgcaaagaatgcatttaatcccatacctggtgctaacgcaattggatatttagctattagccccatgaatagcgagcctacaaatgctgctaatgcagtcgctacaaaaatggcaccttggtccattttcatatcttctgatacgcctttaacacctgctaaacttaaaacttgcgggttaactgctaaaatataggccatagataagaaagttgtgataccgcctaagatttctcttttaaagtttgttccatatttatcgaactggaaatagtttttcacgaatggatgctcctttttttaaaataccttaatagtttaatatcattcttaataaaaaacaataccaaaagcgaacttttcgtttttctgattcaactttgttcgattttatctataaattcaagttctttaatgcatctttaaacggattattgtctaaaccttcatttttattcatatactttttcatttctttacgagatactttaccagaggatttagacttcatacgctgatccatatgtgcttgcgtttcagaatgtccacaaacacaacgatataccgcttctttccctttaccaaacaacgttaatttctttttacagtttggacatcttgcatttgttttgcgctgtacattctttttcgtcttacaagatggatcttggcacacaagcatctgaccatttttagttttaactttaatcatgaatttaccacacgttgggcattctgtggttgttaaattatcgtgtttatatttacgatcactatttttaatcccatttacaacatctttcgtaaaatctttcatttcattaataaatgttttcgcctgatatttaccacgttcaattaaaagtaatttttcttcccattgtgcagttaaaagtggcgacgttaattcttctggtgctaattctaatatttgtttaccttttgacgttactttaattttaccgtctcttgattcaatggcattcatattaaataatttatcgataatgtcggcccttgttgcaactgtgccgataccacctgtttgttttaaagtttgcgcatattttttatccttcaattgaataaagttctgagggttctccatcgcttttaataacgaaccttcattaaaatattctggaggtgttgtttcatgttctctaatatttgtttttgaaatcttcacttcatcgccttctgaaaaaggctgttgcatctctgtaatagattcaccttgtctaatagatttaaaacctaaaacagttgttacattctctttcaaaacaaatgtgtgccctgcaacctctaaagttacagttatcgcgtcatactcgtgcggaggcattaaagcttctaaaaaacgctcgacaatcatatcgtataactttaattctctattacttaagtctgacatgacaggtctaacttctgtaggaataattgcatggtgatcagatactttttgattattaaatatcgacatttttgatgaaaatgttttagacattaatgggcgtgcttggtctttatatgttgttgccatcgtcgcctgaatacgttctttcatagtatctaccatatcagttgttaaatagtttgaatctgttcttggataggttacgactttatgtctctcatataagctttgaagtgtattcaatgtttctttaggtccaattttataacgtctatacatatcttgttgtaaatctgttaaattgtacagtgattgcggatacgacttcttatgtttagtagcaacagatttaatcttaccatcgacatttttcaaattattaaccatctgttctaaagtttctttattggtatatcgctgatttgattctagctgaaaatcaaacccttttaccgttaatgataatgtaaagtattgttgtggtttgaactgattaatctcttgttgtcgtgtatttactaattgaatcgttggtgtctgaacacgtcccagggatagctgtgcatcatactttgttgttagtgcacgcgttgcattaatcccaacaatccaatctgcctcacttctcgctaacgctgcataatacaaatcgttatattgacgaccgtcttttaaatttttaaaaccttgttgaatagcttttttagtaactgagctaatccataatcgacggattggctttttgttaccaactttatccaaaatcaatcttgcaactagttcaccttctcgtccagcatctgttgcaataataatatctttcactttattatctaaaattaacgcttttactgttttaaattgtttgcttgttttaccaataacaacagttttcatatatttaggtataattggaaggtcttctaatcgccattcctttaaatttttatcgtattgttcaggtgtcgcatttgtcactagatgacctaacgcccacgtgacaatatattggttattttcaaagtaaccattacgcttctgatttatttgtaaagcatcagcaatatctcttgcgactgatggtttttcagctaatattaaagatttcataaattatcctttctcatacgttcttttatttcgaacgtgcttcatctattccactaatctttgatttaaattcaatgattgcaaatgatgtgttaaatgtattgtaacatgttaatatcactattaactttcatttcagttgaaatactatataataaaagtaacaaaaagtacggaggtaatgacatgagcatagttcagttatatgatattacacaaataaaatcgttcattgaacattcgaattatgaatcagcatcatacttatataaacttcctcaacagtacaatgaaatagatgtattaataaccgatgcgattgaatcacctggtgtattttcgattaaagaaaacgattcaatcaaagcaatcatattgtcttttgcatacgataaaaataaattcaaagtcataggccctttcgtggctgacaattatgtattatctgtcgatacgtttgaaacgctatttaaagcaatgacttcgaaccaacctgacgatgccgtctttaacttttcttttgaagaaggcattcaacaatacaaaccattaatgaaagttattcaagcaagttataacttcactgactattacatagaagcccgtacaagattagaagaagatatgcaccaaccaaatatcattccttatcacaaagggttttatcgtgctttcagcaaattacacacaactacatttaaatatcaggcacagtcaccacaagatatcattgatagtttagacgaccatcatcatttgtttttatttgttagcgaaggtttacttaaaggttatttataccttgaaattgattcacaacagtcaatcgccgagattaaatacttcagttctcatgtagattaccgtttgaaaggtatcgctttcgagttgcttgcgtatgcattgcaatatgcttttgataattttgatattagaaaagtttattttaaaattcgtaataaaaataataaactcatcgaacgatttaatggtctaggtttccatatcaactatgagtacattaaattcaaattcgaatcacgtaacgtaaaagatcaaacaatccctgaataaaacaccaagcaaataccctacagtacatcattagcatgtattgtgggtttttctactttttgtaaatattgaaaattataagtagttgttttttactattagggcagaatgctttacaataacatgcaagtgtcaattaaggggagcacttgcataaatagtataggagagtgagtagtcttgcaatttcttgatttcttaatcgcacttttacctgctttattctggggaagtgtcgttcttattaatgtgttcgtcggcggtggaccttacaaccaaattcgtggtacgacgctaggcgcactcattgttggattaggtttacttattactggtttcgcaaaattcaataatcctactgtaattattgtcggtcttatttctggtgcattatgggcgtttggacaagcgaatcagcttaaatctattagtttaatcggtgtatcaaatactatgccagtttctacaggtatgcaattagttggtacaacattattcagcgttatctttttaggtgaatggtcttcaatgactcaaattatctttggtttaatcgccatgatattattagttactggtgtagcacttacttcacttaaagctaaaaatgaacgtcaatcagataatcctgaatttaaaaaagcaatgggtattttaattgtatctacagttggatatgtaggtttcgttgtacttggtgacatctttggtgttggtggaactgatgcattgttcttccaatctgtcggtatggcaattggtggctttatcctatccatgaatcataaaacatcacttaaatcaacagcacttaatctattgccaggtgtgatttggggaattggtaacttgttcatgttctattctcaaccaaaagttggtgtagctacaagtttctcattatcacagttacttgttatcgtttcaaccttaggcggtattttcattttaggagaaagaaaagatcgtcgtcagatgacgggtatttgggcaggtattattattatcgtgatagctgctataattctaggtaatttgaaatagaaagttaaatactcatgtaacgtaaaaatgtaatcacttctgaaaataaccattcacttatagaatgattaaaattaattttcgggaattttacgttgaatgttcctctatatgtcctaggaaatacgtggctctaaaaacaaaacgcaataacacatcatgacattaatcatgcgttttaagactttaaaattagcgatacttttaaaatcttgatgatattcatatatcaagtatgcgccatacatatgaagtggatagctgcataacgcactgcattatcaacttgaatgtatgagttgaacaactatgtcataaataaaagcccccttttcacaatatacatttacatattgtggtaaagggggctctcattttctacgaatactaaaatggattttattttcaaatgtgtaaactagacaaacactgcctgatacacgtacaaaataatgatactaataatgattgtcaaattggtcgtcatacctataaatgtcagtgttcgatatttaaactgaataccataagaaataattgcaacacctaccgggaacatccaagtgaccaacaatgtcgtcttaatcatatcatctgatactggtaacaacacatatactaacaatcccgcaactaatgctaatccataatgcaaacataaatatttaatagtagcaggtatatactttctttccagagtaaaattcaacatgacacctagcaaaatcattgataacggcatatttgcatgggaaagtatgctaaagaaatcgattgccacatgtggtaaatggatgtgacttatattcaatataaacattacaatgtatgtaacgagtggcactgattgtaataatttcttacctaaatatttaaaatcgaattgatcactaccttcactaaagtagctacctacaaagtaagtaattccaaacatcacaaaggcaccacctatatcagccataacaaaataaataagtcccgttttaggccatatcacttcaattagtggatatgcaaacaatccaatattcatagcaccagtcatcatacctactgatccacgcatgtgattatcatattttctaaaaaaccagacagcaatcattttcgccacaataccatatataatcattaaaattggtaaaatggagaatgacaattttaattctgcactgtttaaattcacaataactaaagatgggagtgtgacattaagaactaatgtagcaatgacttgactatctgttgcttttataaaattaatgcgcttcaaaaagtaaccaagcgcaattaataaaataatcatagtaaattgttctgtcactgttatcccttctttcaataatcttcataatttataactttaacatactccacagatattttagaagtctactgtttcatgctataatctacattaaatgcacttaattatatttcaaaggagtgttatagtatgtctttagaaaaccaactagccgaacttaaatatgattatgttcgtcttcaaggtgacatagaaaaacgggaatctttgaatttagatacttccgcacttgttcgtcaacttaaagatattgaaaatgaaattagaaacgttcgtgctcaaatgcaagattaataatctatcattcaagcaataaatgctttttgttacataaatttgactagcattgctctgaatacgttatattgatgaattgcttcatttttcgctcaattacatctagaatcacaagatgttgtcgtgttatgatttagtgtttcattaacaacatacacgcatatctatcccaacactgctatttatgttttctacgctgctgtactacatgaaccctttgaaacggagaggaagttatcatatgcaattttatctgattttactagcaatactttatctaattgttagttttattagtatttttaaaatggaagttgtatttactcgcattttgagaattattatgggtgtgttgttattattcgtcttagcattaacgacgatgagttttccaaaagagaattggtgggtatttatcgtcttattactcttagtcggtaatgtcgaagtgacaggatttaaaatgcttaaaaaagatctaaaaggcgtaaacatcttgaatttaatgtcattatttatctttgtcatatatttcatcttaaccatcgtattattctaagtaataaacaaaatatgcaataacataattgcaaccttattttattatcggattacatgttgaatgccagtattgttttattaacacatcgattaaatcgcacgtgaaataaggtctaaaatttcaaattttaaaaagccataaaagtagtcaatatcatgaccgcttttatggcttttatattatctatcgtttagtgaatcgtttttttaaagtaaagagaatttcatatattactggtacaactacaagtgttaataaagttgatgaaattaaaccaccaataactgtagcagctaatcctttcgaaataagaatcgagctatcttgaccaaataacaaaggaactaatgcaccaattgttgcaatcgccgtcattaatatcggtctaattctagtaccgcctgcttcgattaatgcttctttcatctccatgccctgttgctcattattaataacacggtctattaacacaatggcatttgttactacgattccaattaacattagcataccaattaaacttggtactgatattgtttctcctgtgattaatagtgcaataattacaccgataactgtaaatggtaaagagaataaaattgtaaatggtgctaggccacctttaaatgtaataactaggattaaatatacgataatgattgcagctaacattgcaaaggctaattgtgtcattgcattgttaatatcatctgatgcaccaccgatattaacctttacattattcggtttgtccaaattatttattttagacatcacttgtcgtgttgtgccacccacatctttatttgttactttagcagataccgtcgttgcataatctccttgttcttgcgtcaatttacttggtgtcgttgttttaactaacgtagcgatatctcccaatttaatcgtaccaccagtcggctttttcaaagttatattattcaacttatcttctgaccagtctgtttgcttattttgtttgactttaacatcaacagttttaccattttctttaacagtcgtaactgttttttctggtaagttttcattcaagtgcattgcaagttgacttgcagaaataccattttctgccgctttattttgatcgactttaatttcatactgatcatatgtttgcgataaatcagatttgacattggctagtcctttaacctgtttcattttctgttcaatatcttttacagttgattttatggcatccattgatggaccttttacagtaacctctacagatttattacctgcacctgttcctaaatcttgatttttccactctccaggatgtttaaagccatctgcatgtttaataaccttatccgcttctacatcaaaattaggcgtgtcattatcatattcaaccatgattgccatactatttgtactacccgttggatctactggactactaccgccaactgagtattgaattgtttttacatgctttttctgttttaaatatttttcaacatctttcgcatgattcaacactgcttgctccgtttcaccaggcttcggtgtataagtaatagctaaaaatttatcgtcacctgctgaaataaagctagtgcctagtctcggtcctccaaatacaatagttgcaaccaaaattaatgtacttaatataattacaatccacttatgatttaatgaccaatgtaatacttttttataagttgtactaacaacacctaatccttcttgatgttgtttattacgacgtttaacgccttttttaaatagtgtagctgccaacgctggaacgagtgtaattgacactaataacgatgctaataaactaaatgcaatagccaatgcaaaaggtctaaacatttcgcctactgaacctgatacaaacacaagtggtaagaagacgataatagtaactagtgtcgatgacattattggtttaaatacttcagttgtcgcactgataattaaattttcaccttttagttgttcttctgaatctgttaagcgtcgataaatattttcaacaactacaatcgaatcgtctatcacacgtccaatcgctactgttaatgcacctaacgttagtatattcaatgaaacatcactcaatttcagagcaataagcgccataagaagtgataacggaatcgatataatagaaattgccgtcgtacgaatgtttcttaaaaacagcaaaataactataattgccacgattgtacctaatgatgctttttcaaccatcgtataaagtgatttctcaacaggctttgcagtatccattgtttttgtgacattaaaatctttattttcatcaacgaatgtatcaattttacgttgtacatctttggctacttgaactgtattggcatcttgagctttagttatttgtagattaaccgcatcctttccattcgttttagaaatagaagtacgcacatcaccaactgtaatatcagctaaatctcctagtttcgctgtcagcataccacttatattatttggtgctgacgcttttgaattttgctgtggtgatgcctgattaacgtctgacatggctgaattttgtttattgtcactttgggattgagattgcccttgtcctcctgccaacgttaatggaatatttatgtttttaaaagcatcaacagattgatattgaccatcaacaacaattgatttatctttatcaccaaattggaacaatccaagtggcgttgttcttgttgccgtttttagatagttttctacatcatcagcagtcaacccatatttttcaagttcattttgcttaaatttaagggtgatttcacggttcgtctgcccatttaattgcgcattttgcacaccatctaccgtttgcaattttggtattaattgttcattcagtactttcgttacttttttcaagtcattctctttatttgaaaatgaatatgctaaaaccggaaaagcatccatcgaattacgtcttaattctggttgaccaacttcatctttaaatttaattttatcgatttcttttttaagctgttcttctgctttatccatatctgtattattttcatattcaactgttacaattgaagcattttgtatggattgcgttttaacatttttcacatatgccaatgatcttacttgattgtcaattttactacttatttcatcttgggtactttgtggcgttgcacccggcattgttgttgtaactgaaataactggattttgtacatttggtagtaattctaatttcaatttagcactcgcatatacaccgcccaagacaactaaaacaaccattaaaaagatagcaaacttattccctaaagaaaattgtaatagcttttttatcacagtacttccccctctttcactatattcaaaaatattttactcaaccattctatattgtgtaaaaaaatctgaacgcaaatgacagtcttatgagcgttcagatttcagtcgttaatctattttcgttttaatttacgagatattttaattttagcttttgttaaacgcggtttaacttgctcaattaattggtacaatggctgattcaatacataatcaaattcaccaatcttttcacttaagtatgttccccacacttttttaaatgcccataatccataatgttctgagtctttatctggatcattatctgtaccaccgaaatcgtaagttgttgcaccatgttcacgtgcatacttcatcatcgtatactgcatatgatgatttggtaaaaaatctctaaattcattagaagacgcaccatataagtaatatgattttgagccagcaaacattaatagtgcaccagaaagataaataccttcaggatgttccttttctaaagcttctaggtctcgttttaaatcttcatttttagcaattttattttgcgcatcattaatcatattttgcgcttttttagcttgcttttcagatgttttcatcttctgctgccatttagcaatttcggcatgaagttcattcaattcttgatttactttcgctatattttcttttggatccaactttactaaaaatagttcagcatctccatcttcatgcaacgcatcataaatattttcaaagtaactaatatcacgcgttaagaagccatcgcgttccccagtgattttcattaactcagcaaatgtttttaaaccttctctatcagatcgttctactgtcgtacctcgctttaaagccaagcgcacttttgaacgatttcggcgttcaaaactatttaataactcatcatcatttttatcaattggtgtaatcatagtcatacgtggttggatgtagtcttttgataaaccttctttaaatcctttatgtttaaaaccaagcgctttcaaattttgcaaagcatctgtacctttatcaacttcaacatcaggatcgattttaattgcatacgctttctcagctttagcaatttcttttgcactgtctaacaatgcatttaacgcttctttattactataatcaacaacaaaaccacgcgaaatataacatagcgtataaggtaatttaggtacttttttaaaaagtaactgcgcaacaccctgaacttcaccgtcacgacctacagcgattcttcgcgcgtaccatccagttaatttctttgtttctgcccatttcgttaattgtaataaatctccatttgggtgggatttaacaaatgcgtcatgttcctgattagtgatatgcatcttttccatgatttatgatatctccttctatttaacaatacctttaattatacagtttgtatcttatagtgtcgattcagagcttgtgtaagatttgaactcttatttttgaaatgtccatgctccaattaatagtttagcaagttcaaatttacccattttaattgtgaatcattttatatctatgtttcgtgttaaatttaatgttatcgtacaattaatacttttcaactagttacctatacttcaatatactttcatcatctaacacgatattcatttctaaaatgaaccaacttgacttcaatgaataaatttttcctcaagcaaccacattaatgttcatatacaattacccctgttataatgtcaataatctaacaatgaggtgtttgatatgagaacaattattttaagtctatttataattatgaacatcgttgcaatcattatgacattgagtcaacctctcaccgtgaattactttagtttacgggttatacttatctttttcacatttatattatcaatctttttcattttaattaagtcatcacgattaaataatatattaacgattctttccattgtgcttgtcattattcatatgggcattctcgctcatagcacttacgtatatttatactaatggttcaaagcgataaatagcacctctgataaaaattgaatatggtgaagttgcttgtgcgtcttttatgataaccgaatgatattttgaaactttaccatcttcaattctaaaataaatatcatcattttttaaaatcaaatctgtgtaatggtcattctcttctacaatgtccatatcaaaccatttcaaccaattcgatactgtttgtgatcggtttttacttttcacaataacagtttcaattgaaaattgtttttgaaaatatttttgcaattttttagtacgcatggaatcactttcttcccattgaataaaaaatggtggcttaatttcatcatcatcctgattcattatataaagcaattgccactttaccttaccatctttatgtgtatctctttccatttgaatcggccctactacttcaacctgctcactttgtagtttatttttaactgcctctatatcatttgtacgcaaacaaatatttttaaagccttgctcatacttctcttgaacaatttgagtagcaaaagcgactccgccttctatcgtttttgccatctttttcaacttttcattattttctacatctagtagctcaatataattttcattgatataacctaatttattgaatgttccatatttatgatgatacccacctgaatgtaattttataacatctcctggaaaactaaaccgatctaactgatctatataatgaatgatgtgatcaaatttcaatatcattagtatccccctatttacatgtaattacgcttattttaacaaagtataattatttttgctcttaataattatatattgatttctaattgctcccgttttataattactattgttgtaaaaaggttagctaagctaactattttgtcttaggagatgtcactatgctatcacaagaatttttcaatagttttataacaatatatcgcccctatttaaaattagccgagccgattttagaaaaacacaatatatattatggccaatggttaatcttacgcgatatcgctaaacatcagcccactactctcattgaaatttcacatagacgtgcaattgaaaagcctactgcaagaaaaactttaaaagctctaatagaaaatgaccttataacagtagaaaacagtttagaggataaacgacaaaagtttttaactttaacacctaaagggcatgaattatatgagattgtttgtcttgatgtacaaaagctccaacaagcagtagttgccaaaacaaacatttcgcaagatcaaatgcaagaaaccataaatgtgatgaatcaaattcatgaaatattattaaaggaggcacacaatgactaatcaaggctcattaaataaatcacctattttcaccaaaagttttacaattaactttttagtcaactttatcgtatacctatgcatgtatttgttacttgtagttattgctggctatagtaagcaagctttcgacgcttccgattcattagccggattagttgtaggactatttattgtcgggtctttaattggtcgatttgctacaggtaaatttgtaaatcaaatcggacctaaacgattattatttattggtttaattgctttaattatcacgcaattactttattttattgatggatctttagcttttttaatctttgtacgtctcataaacggtatcgcaactgcagttgtgacaactgcaacaggtactattgcggcatacgttacccctgttaatagaaaaagtgaaggcatcagtttattttccttaagtttagtattaggtacagcgattggcccatttctaggcatgttacttattacaaaatacgcaattgacttactgtttattatttgtgtcatattaggcatactcggactcattatctcattatttataaaagttgatttcgaagtaacaaataacaaaactgaaactaatgtcattgataaaccaagatttagtattcatcaatttattgcaaaagaggccattcctgttgctgtaattatgcttttaattggcgttacctatgcgtccatcctaacttatttacaagcatttgctttagagcgacacctagtcactgcagcaagctatttctttatttgctatgctatagcatcgttaattactagacctattgctggtagattgatggatgataaaaatgaaaatattattgtctacccagcatttatcatgcttttcctttcatttgtatgcttaatttcaagctatcaaagctggttaatattacttgctggtgcttgcctaggtttagggtatggaaatttatcatctgcaatgcaatctattgcgataaaagtctcacccccgattaaatatggtatcgcgacatctactttttacgttggtctagatgcaggtgtcggcttcggtccatcattccttgggttatttactcatatgttttcatatagtgaaatcttcggctttatggccgctttagcaatcattactatgcttgtttacttcttaattcatggacgtcatgtaactagaaatgccatgaactaaatatttatattcaaaaataaaaagcatgccaatctctattcatcatttgtctgtccccaagacgcaattatgatgtactgattggcatgctttttaagtttttagtttgtaacgcttaacacttctatttctttagtaattttatctaacaatttcttttgagaagtactatagaaatagaatacttgtctttcatccgtttcagaacgcaatttagaaataagctcttttttatagattttacggataatcacatcgattttacttgtatcccatagcatttcaaaatgtaatgtatccctcaattctttaccgctaatcttttcagcttcatacactttaaaaaggactacaaattcttcaattgaaatcttatgtgttgtttttaaccagtgctttaactgacttaactccctttctgcttctataaaacgttgaactttattactcataatatgatgcctcctatgtttcttcttagatgtttgtaattcatattattatacaattacttaaatttattatatatcaaacttagcattttatctattacaaatattaaattgctggctatatcttgtttagatttatatcttttggacaacttgttgtttattcgacaacatttatacctaaaaaagatatattacaactcaatggcatggagtgtgacatcaatgttaaagaaccactaaagatttattatgtagtgattcttaagagtgggatagaaatgatattctcataaaatttatttcgttgatccccaacttgcattgtctgtagaatttcttttgaaattctctatgttggggccccgccaacttgcacattattgtatgctgacttttcgtcaccttctgtgttggggccccgttccccaacttgcattgtctgtagaatttctttttgaaattctctatgttggggccccgccaacttgcacattattgtaagctgactttctgtcagcttctgtgttggggccccgccaacttgtaaaaactttaaaaacgatcatttctattaaatctggcatagatatgaccgtttttactttaataaataatattgtattttagggagtaagacagaaatattaaaacatctctaatgatttaatatgtagtggtccctacacattaaccaccaatataattcatgtttatctttttacgttgacgattggcaactgtttgagcagttctctcatctgaatatcgatcatctcttatttgccataaagctttaaattgttcttttaattcttcgtcggtcacgccagaacgaataaacgctttaacgttaaatccatcgacagttgcaaataaacatccgtaaaacttcccatctgatgacagccttgcgcgtgtacatgtagaacaaaatgattgtgaaacacttgtaatcaaaccaaattgaacaccattatccttatggcgataatattttgctacttccccaaaatattttggttctacaggatcgatttcaaagtgctgctctatcattgtaagcatttcatctttagttacaactttactgaaatcccatccattatcattaccaacatccataaattctataaatcgaatctctatatgtttatctttaaaatattcaagcattggtatgatttgatcatcgttaatacctttttgtataacaacatttacttttacattcaaaccaatagacgtcgcgtaatcaatttgttctaaaatcgtagtcgctttaatattacgattattgattgattgaaatagcgtatcatcaatagcatccaaactgacattaattctgcgcagcccagcatcatataacttttgtccatgcttttttaataacaaaccatttgtagtcaaaccaatatcttcaataccatcgatttgatttaatttagctataagtacatctaaatcccgtcgcatcaatggttctccacctgtaatgcgtattttttttacacctaattctgcatataccttagcgattctagccatttcatcaaacgttaaaagttcatttttaggtaaaaatacgaaatcatctccaaatacctctttaggcatgcaataatcacacctaaagttacaccgatctgtcacagataaccgtaagtcacggatgggacgtcctagtttatcttttatttgttctaccatttgtggacctcctaacagcttacaatttttgaattaaagcgtccaaatcatgctgataatttatatttttgtaccaatatgagggcgcatctacatcccttacatccaaataatccgttgataattcatgatatacatttttaaaactgtaattatcagaatgtagtgctttagttatagcgcctaatgcattcggactataaaatgcaattgttggaataaaacgtccatcttctttaaaagctgcgacatctaaatgattttcaataagatgagaaactaaaaactgatacaacgtgcttacagctttaccagtaatcattggtgtatcaacagaaacgacaaaaaacaattcttcttcaggatgttgcttcatgattgtataaattcctgctaatggacctttatcattatgattctcatcatctataacaacatttggatatttaaattgcgttgccaattgcgcatttgtactaataataatttcattgaacatatttgttgattctaatgtcttaattactctactataaaaggtctcaccgttcacttccgcaaaagctttgggcttaccaaatcgcactgaatgaccacctgcaagaattattgctttcatgctcccttaacctccactaaccggtggaattaatgcaacagtatcattaggttgaatgaaatccgatttttgtacaaattcctcatttacagcaacttgaaactttttattattgatttgcggataacgttcaaacaataaatcttcaaattgttgtacagtcaatgcttgttcaagcacaatatcttcctgtgctttttgtaatatatctttaatttctgcgaagtaaagtaccttcatctctcttattcctccctcttcgcttcttcataattccctttttgatgcccttgccattttgaaccatcttcccaaatttcttttttccaaatcggaacaatttcttttatacgctcaattgcatattcatttgctcgataggcatctttacgatgcggtgaagaaaccgcaattaatacagcgatatctgaaatttgtaatggccctattctatgaacaatactcgttatcgttccaggccatttttcatttatttcatctccaatttgtgccaatttcttttcagccattggaatatacgcttcatattctaaatattccgttttgacgcctttagtccattcgcgaacatgaccggtaaaaacaactactgcaccttgatattcatttatagtgaattcacgatattgttctgtttgtatcggttctgtcacgatttcaaattgtttcattcatttcaatcctctatgttaattgtgtatcacaatcatttttaattttatttaataaccattgctcaaatgctgtaaaatcttcatgctcccttacattaatgctataacaaacattcgacaattgttgtaatacttgcaactcttcttcatttcgatagactacgactttttcaaaatcagcatttttaaagccttcaactaatacgatattggtgtcaattgtaacagatttttcaataatttgagtaagattttgattatctacacgtgttacagtttgctgatattgaaaaccttgtacaatactttgatctgcccccgcttcaaaatgcttcatgtgatcgacgtctgaatcctgtaattgaatatcttccttaccatgcccatgatgtttaatagtagcaactgtataaccatgtgactttaagaaagagacaatatgcctcatcaatgttgtcttaccagactttttgtaacctacaatttgtaaaatcataaaagaagttcctcttcagcagcgtcagattcagtcaatataatatctactgtatgccccgctttaaaaccacgtgaccctcctggtaacatgaccatacagttagcatgtgcaatcgctacaaccgcacctgatttattgaatcctgaaggtactacagtagctccagcacttgttaacgttgctttagcacgtataaatcgtgtgaatgggtttgccttggtaaaatcttccattaatgttgctttaattatttgcgggaagacttctagtgcgccacacatatgtttaacagctggtttcacaaatagttcaaatcctgtaaaacaagctgatggatttccagataatccaaacaaatactttccatctacaaatgcaaccgttgttacgctaccaggacgcattgctactttattaaataacacttccgcctttacagccttataaatctcaggtaaatagtcaaaatctccaacagaaactccgcccgttgtaataacgatatcatgtttttccatagcttctttaacgacttggatgccactatctaaatcatctttttgtgttttgtaaataccaacttcaagacctaatttttctgctaaggcacgaatcattgggccattagagttacgaatttttccatcttctaatacatcattaacatctaataattcgcttcctgttgcaataacagcgacactcggttgcttaataactttaacctctgcatagccatatgttgcaaggaccgcgatagcccctggattaattacttgtcctttttttagaacaacatcgcctgtctttgtttcttcaccttttaaagatatattttcattttttgaaaatggtttacgaattgtaaatgtatcttctagttcaatcgtttgttcaaacataacaacagcatctgcgccattaggtatttgtgctccagtcataatacgcaccgcttcgtgatccccaactaatttatcagaaactgaacctgcaccaatatgatcaatcactttaaactcaatgcgattctgaccacttgccccttgtgaatcaacactgcgaattgcaaaaccatcataaggtgatttatcaaaccttggtatatcataagtagctacaatatcttctgctaagatatgatttagacttttttcaagtgctaccgtaattgccggcattgaactctgctgattaacgatacgttgaattgcttctttaactgggattgggtttcttttttctactaccattaaaaatcatctccaaaacttttattttttcatgatatactagatgcactaggaggggtaaaatgactgagtttactcatattaatcaacaaggccacgccaaaatggtcgatgtatcagacaaacaaattacaaaaagaactgctgtcgctcattcaagcattactgtaaatgaaactatttttaagcagatttctaataacaccaataccaaaggcaatgtattgaacactgctcaaatcgctggtattatggctgccaaaaatacatcaacacttattccgatgtgccatccattaccattgactggcatagatgttcacttcagctgggatgaaacaaatgcacccctttatactttaaacattcaaacaactgtctctacaactggcaaaaccggtgttgaaatggaagctttaaccgctgcatcagcaacggctttaaccatttacgacatgacgaaagcagttgataaaggtatgattattggcgaaacctaccttgaaagcaagtctggcggtaaatctggagattttcaacgccaatcaaatcaataaattattttgtaagctcatgaatcagatgatttaattctggtttaatgagcttttctaatgctaatttaactgcgcctgttgatcctggaatcgaaaatatcaatttattattaactgtacctgctacagcacgagacaataatgcacgcgtgccaacatcttcaacataactcaaatatctaaacaattccccaaagccatctatctctttagttaaaagtggttttactgcttcaatcgtcacatcacgttgtgcaatacctgttccaccagtcgtaatgatgacatcaatatcttcttctaaccacttcttcacctgcgtcgtgatggctactttttcatctttcacaattgtataatgtgcgtcactcacttcaacgtcatctgcttgtaatagttggcgcacgcattgaccacctttatctgtatcaaagtctctagtatctgataccgttagtacggctgctttaactgtacgattcaatttaacgttttgatgttcgcccataatattacactccttttgtcttatctttttttatccaaacaataaattcattagatgtgtggcatctgatgtgcgtgtcatgccatgtattaaaaaccttccacctttaaaagcaacaatgcggtgtcctttaaattcaaacataaccatatacgaattactgcgataatttaactgatgttgttttaaaaattgaacaagaatgtcgtgtgtaattgatgcattttcatactgtacagtgtctctaccacacaatgttgcataacgttgttcattcttgtttaaatacggataacttggtacatctccacaagttgtacagtctgaacgttgcattttactgaaaccaaatgaataatgactaccttcccaaatatcgccataagttatttttgtgtcaattggttgttccgttaatactttcatcgcatctcttaattgtaaacttgttgccatcgtcacggcaggttgaatgacccctactgtatcacatgttaaatttaatgctggcaattgtggtaccaaacagttaaagcaaggtgttttaccaggtataaatgcagcttctgtatatgtactctgtacaacaccaccataaatccaaggtatacgatatttatatgcaaaatcattaatcagttgtcgtgtttcaaagttatcggttgcatcaataataacgtcaacgtcctgtccatgtgtttccaaaaaataataatccacatgggcaatataatcatcaatatcaacatcactacgtaacgctagcaaatgctttttagctgcaaccaccttaggcatcattttcaaagcatcttcttcagtaaacaatgtttgtctttgtaaattactaaattcaatataatctctatcaacaatgattagtttggcaatgcctgctctaacaagtccttcggccacatgtgtacctaatgcgcccataccaataatcaacgcacatttttgatttattttgctttgacctatttcacctatttgtttaaataaaatttgccttgaataacgttcttgactcacattaagttatcctttctttttatcattactttcattatatgacgcgcatcaatgtctctcaaaaaaactgcccctaaaaaagagtttaaaacatcattaaaatgctgatagaagcattcacttctacaattttaaatacgttctaaactctttaatggcaaataaatgattacccaattgtaataatttcatgagccatttgttctgcttcatagtttgaatgtgtcacaaatatgattggtatttgccattcgttgaaaatacgtttaactaatgtaatactctcatcttttgtagtatcatccaaactagaaaaaggttcatctaataaaattaaatctggtttcgtgctaagtgcacgtgcaagtgctacacgttgtgcctctccacctgacaatgtcataggatattgtttcatcaaatgatcaatgtttaaagtttgaattaattgatcgatgtgttcagatggttcagccataaaagtaatatttttatagaccgtcatattaggaaacaattggtagtcttgaaacagatatccaatacgtcgttgttgaattttaacattcacgttttttgccgtatcagtaagtaattgcccattcacttcgataatagcttcatctgctttacgtaatccggcaatcatatttaaaacagtagttttaccaatgccagatggaccacgaactgcataaatttttggttcagtatcatctatattgatgcgaattaaagtgttctttaattgatatttcacattgattttaagcatctagtcgacctccttatatttatctttattcaataaattaattgtagatataaccacaatagagaatgcgactagcactaatacccataaccacgcttcattttctctaccttgttccactaagaagtatatttctaaaggtagtgtattcgttttatttggaatatatcctgcaaccattaatgtagcaccaaactcacctaatgcacgagcaaaactcatcattatacctgctaaaatagagcgtttagctaatggtaaaattaatttgaggaaaattttcgtttcacttgctcccatcgttctagctgtattaatcattttcgtgtctatacctctgaagccttgcacagtatgttgatacattagtggaaaactaacaatgacagatgctatcacagcacctgtcaaagtgaacactacaggtaaatgtagtacattcgcaaagaattgaccgattggtcctcttggcgagaagatgattaatagaataaaacctaataccgttggcggcaaaacaataggtaatatcaataaactttccaataatttaacccacgaacccttacgacgatacaaccatttagatataaaaatacctaaaaccgttacaataatcgtactgattacagcaactcgtattgatatccaaaaaggtgttaagtcaggcatggattacaactccttatgctgcaaagtggtattcttttagtatttctttagctttatctgattttaagaattccatccactcttttgctaatttactatctgatgtagcaccagcttcgtatgtgattggcttcttaagttctacttctttaattacttttacagtatcaatttttttattttgtttatataagtcagttttatacacaaaaccttgtttcgcattacccttttcaacataatttaatacttgttttacatctttagcataaacgattttactttcgacttctttaaataagttattgttatctaaatactgtttcgcatattttcctgctggtacagttttcacttcacctaatgctaatttatcattgtcttttaagtcttttactgaagtgtaatttgaatctttatcaccaattaatactagactatttttcgcatatttatatgtatcatgcgctttattcttgtcttttaatgcatctacatctttagtatttgcagacataaatacgtcaacaggtgcgcctgattcaatttgttttcttaatgcccctgatccaccatagttaaatttaatatcagcatttttatgctcttttttaaattctgaagctaatttcttggttacatctgttaaacttgctgccgctgcaacttgaatctcttgtttcttaccattgtctgcgtcatcttttttactttcattattatcgttagaattagagcaaccagctaatactaaaagcattgcaatcacaacagcaaataaacgtttcaatttcattgagtgaacccccatttttaataatatttacattttcattatacacttactattatatttgaaaagaaccgttgcctgtttatatattgattcaaacaattgtcaaatttgcataagattgatatttattaattgatgccctagtatgtatattctcgaattcaatttaaatcaaacagattgctcgctattaatttttatcaatcaaatttcaaacttaagcaaatatgttaaaattttaagcaaattgctttaaaataaagtttaagctaattaaaggggttagataatgaacaaagatgtatctttaggtcaaccaattgttagatatgaagatggaaaattattcaatacaacagatcaatatgtgacagaatttccacttacaattatggtgaatggtgaagaatttgcgactgttatatgcagtccaacaaaccttgaggagttagtcattggatttctggcttcggaaggtgccattttaaagcgagatgaattaaaatctgtactgattgatgatagtaaaggttttgcccatgttgaacttaataaagatttaggcgatcgctttcaatattccacaaaacgaatgattgcatcttgttgcggaaagagtcgtgagttttattttcaaaatgatgctgctatcgctaaaacatctatgtctaaaatcactttaactccaatgcaaattattaacatgatgactcgattacaaagtgcaagtcatatttaccaagaaacaggtggcttacataatgctgctataagcgatggtttgacattttttgtacatcgacaagacattggtagacataacgctctagataaattatatggattttgtattcagcgacatattactgtccgagataaagtattaatttttagtggacgtatttcatcagaaattttaattaaagccgcaaaaattggtgttggcgtcattttatctaaatcagctccgacaacgcttgctgtaaccttagctaatgacctaaatattacggcagttggatttattcgaaatggtggctttaatatatacagtcatccagaacgtatcattgattctgaacaataacatattcattatagtgtgtcataatgaacgatattctacatgaatcaacaatttaaacgcactatttttataagtataagtagctcaaaacaatttaaaaagcagtaagttgatttctactcgaaaccagcttactgcttttttattctaatacaaacctatcatcaatcgttaatttccaatatcttcttttaatatttgataacaaaacgattgatagacataaccttgctttgcatacatatcttttgctgtatcttcaccatctgcaactaatatgattggtttgtgattttttgatatggcgtattcacctatcaacgattgaattgtagatccaattccttggtgccgaaattgttctaatacaccaaatccatctaattcaatgtaattttcactttcaatgacatctacaacgccaataggttcattatttaaataagctactaagcgtttaatcacatctttttgataatgttcccttaccatttcttcatgtgcatctgcatagtcttttccaaatggcaaactaaactgatatgcaacttttaaataggcatctatatgcgactcgtcaacgatggcaatttcaacgtcagagttacgcggcaaattggcaagcgcatcactttctatggcatacaattccataatacctagttcaaaattcatatctttaaacatagccatccaatgattatcaagttgttcattttccgggaaactaaacgcataatgatttgaaccttgatttgtatgtaattgatgttgacgttctaagtctttcagccatcgctcttgggtaggcgtctttttatatatccatgtgttacttgtgtatcgttgtggaaaagaaggcgttaaataaatcaactgctcgtcgtcattttcaaatatagtgccgttacaatatatatctgacatacttatactagccattgacacctactcctttcacttttataaatttcaaagcaacttattcaattactttactatcttaaatatgattattttattcccataatttgacgaaactgcgagtgattaagtaaagctgtaccaatcaaacttgctacaattgcttttaatatatcaccaggcaaataagctaatgaaattgaaatagctttcgtaaatggtatgttaataatcatgcccataatcaatgtaccaataacatctaatgctataacaccaaaaactaaaataccaacgaataaaatccagaaattaatttcattgatgaatctatctcgaatcgccccaatcatgaatgctacaactggatataatagtaaaaaccctgctgaaggacctgcgaatacaccgatgccaccgcgaccacctgataacaatggcaagccagcaactactaataataaaaagacgataacacttaatgtgccatatttacgtcctaaaatcacacctgctaagaaaataccaatgttttgaagtacaattggtactgaagaaaatggtagtggaattaccggtaccaatcctaaaatagcgataatcgctgtcattaaagctgtatatactaactgttttgttgtcattttttacttcctttcgtatttcatgaccattattatagcaccattgtaaactttaagaaatgaaaagtttacaataagttgttctatataaattaaaaccttaattattctacacagctgttaatttacttttttagcaagtgcagttatataatcaaaaaatgcgttgttatctacatgatttatgacattaattttgcgcccatctttacactcaaatgtcttaccttgacttggtccataacttattacatcgacttttttctcaattgaatgaaccaagtccttgttaccaatataagcagtcgttaaaacatcccataaaaagtaagtagaatttgttataaagtgtgttaatggtggtaccgctgcataacttactcctaaaaaatcaatgcccgtatattggcgttcattcgcccatctttgtctaacatctaacgttagcggtacttgattcgtactttctaaagcaaccatatcaatctctatatcgctatcaaaaacaattttaaccgcttctggatcccaatatgcattccattctgcagaaccatcatgctcaggttcttcaacatttccttttggtaaaaaggtgccacccatccaaactaatttttctatatactgaacgatagatgaatctttttgtagtgcttttgctaaatctgtaagcgggcctgtaaataataatgttactttttctgattgtctctttaaagtttgaataatgtcttcaaaggcttctttgtcgctcacatttgaagcaacatgtttgactggctcatttaaaattggcaatgcgtccataaaaaaggcatgcatacgccattctttaggaaatggattttttcctcgttcatatgatggcgcaacttgaatatcttcatttgaaaaacgattaataatttttactgatgcgctcaaagatggctctaaataacaatcagcaccaattgtactgacccctatcaattgaacgttttccatttgtaataataaaaatagagatactaaatcatctacaccaccatcgtggttaaaataaactttcttagtcactcgaaatcccccttacatttcattttccattaacaatattatgtttttataaaacgttgttatatatctttctacaaaatcataacattctgttgtaatccttttaaacctcttctttaattgaaagccattccctgatatcccttccataaagtatgcactaaaataattatgatataacttattaataaagagatacattgagctattttctcaggtatactactttagctataataatactaatctatcattaattaaattgaacgataacaacggcacttattatttaaaaaaatacaaatatctaactttctagctataaaaataagagcctaatacaatatcaaaagattgatatgtttcagactctcatttcactaacttatatagctgaattattttgcagctttaattaatttttcttttaaatctttacgcatgaaatctaatgtataaggatcgttgtaccagtatgtaccagcatcaactttaacaatatgtccttctttagtagctttcaaattcttccacatgtttgttgattcgtatcctggtgtaggtttaccttcacttgtactcacaatgtaatcaccagcatatttttcaatttcttcttgtttcacttcagcccaacctgcttttgcagttaacttttgttgttctggttgcattttcaaaccaaatgcttgatataatacttctccaccacgaccccagttatcgccgtaagtgtataattttttatcaaattcatcaaacaatgacactgttgcatcttgtccaattgcttttttaatttctttaccgtctttagcagttgtttcttcccaatctttcttccaagcttttactttatcttctttaccaacaattttccctaacatttcttgttgttctaaatatttatgcttattatagtcaacaactactgttggtgctactttttgatattttttaatatctttgtcagtagagtatacaataattaaatctggcttttctttagcaactttttctacatcgccatcaccaatttttgtaacacctttaaatttatcttttaatactttgctttgatcgacttgttgatttacagctacaatgtttgcacctaattttttaagtccaccagcatatgttggcgcaactactgcaatgcgtttagggtctttcggaatatctaccgttttgccatcgtccattttataagatttagtttcagctttgttatttttttcaccttggttcccacacgcagctaacactaataacataattattaatggtaataatagttttttcataatttcctcctattgaaaatgattatcaatcattcaaaaattatacaagattgcatatacatttacaatagctagtgttatttattttttattttcgcaaaaaatttaacaaaatatcttaacatccctataaatccccacaaaaaaagggtaaatccgaacgtcaaatttcatctctttatgccaatcaacgatcgatttaccttttaaaatttaaaatgtatctgtaatactcttagcaatatttgtatatgctgcatcttccataggtggattgtgtaatcctgcacgcatgtcacgatagtaacgttgtaatggtcgattcatttctaagcttttagcaccaactattctcatcgctaaatcaatcacttcaagcccttgattcattaccatcactttactcgcacttgttggatttcttatctgactgtcatctttatattgttgatacccttttgctgtactccataaaaattgtctcgcacataacaatagcgtttccattttccctaaattttgttgcacagttggcaatgttgcaatcgttccttcaatactattagggctatgttggattgcaaagtctacagcataatttctagcagcttgtgctatacctaaataacagcttggtatatgcaatatccaaccatttggcgctttacttttctctgtttccactaaatgttttaatggtacttttacatcatttaatattaaatcatgactttctgtcgctcgcatacctaatacgtcccaattatcggcaatttcaacaccaggcaaattcctgtctactaagaaaaaaccaacactttctaattcttctatataagcagcaacaataatatgtgttagtgctttactcattgatgtatatgtcttcacaccatttaaaatatacccatcatcagctttaacagcatgtgtacttggtcttccccctcttgttggactacccatttcagcttcactaactgctctattaactaatgcaccattattaatttcaacagcaaattgctccaacatatcttgagaccataatttctgttcataaatttgtcctacgacactcacatgccaaccaatagataatgctgtggcaccatcaagttcgcctaaaaatgattgcaaaataaccatgtcttctatggtcgcaccttcaccaccatatgcttttggtaacgttaattttccataaccttctttaattaaccattcaatatttttatatggaaattggctatgttgatcattatattcagctttagccttaaatgtatctctaattactttgaatttttcaatccattttctttgaatttccgttgttattaaaaaggaattatccatatcattcatattagtcaccccacacaacacacaatataaattatttattcctagtttaacactcgactttaaaaataaaaaggaacgtgctgtgaacaattaaaagaaaactgataattcgattaagtatgcacttaattttatccataaaaatacaccttaaactatacaattcgctgtatagtttaaggtgatattcaaacaatattaggtttgatttaactatcaagcatctactttgtcatgtttaataccagcaaataataaaatccatgtcacgataataaatggcaatgttaatgcaggtaagccaaacggttcaagcaatgttgttgtacctagttgcaccactactgttaataacacacctaaaaaagtcgaaatataagggttaatcgctgttttaaatgtatatcctagtgcgattgccattaatacaaagttataaccgaataatccctgattaatatcatcataattaccacctaatagagctacaatgataaagcttaacaaactagctataacagctaagagtgttgcttttcttgatgctatcaatatgccgattaaaatacatacgccaccaattacactcgcttcgataaatacttgactgaatccttcaaataatgactgaatgaaatgtattctatcattgttgctaaaattaaccgtttcaatgttttgaggcattaactttaacgatgtatctacaaatttaacctgtcctgaaagtaaaattgtaaaccaagtcacaatgacaaaaggcatcgtcagcatcggaactttatatggtcttaaaacttctctcactgcagcagcaactggtaacgttaataaagttgctatcattgttataacaatatctaatcctgacttatctaaaaagattgttaacgcaatggcagttagcactggattaaatccagctaacccatcattaatctctgcctcactataatttataaaacgcgcaaaagtataggcgatgatgctacctacaatagccgctaatccaattgtccaatcggctacaaataatcctattaagataaataatcctgtccatttattactaattaacacaacctgagatatatttttcaaaagcacatctattatcttcaaatctttcacctttcctttgaatcattactcattaatatactactattctatgaaaagttatattaaaaactattttggtttttacataaatatattccactatttgttttcgattagattgtttgcttcaatatcggatatgctaaaaatataattttctaattacacattgaactttgtatattacttgtttatcacaacaattaggattaatataaattttgtaaattgtatctaatatgaaattgggggttttaatttgcattttacacaacgagagcaagacaaattaatgattgtagtggcggcggaagttgcacgtcgtcgtaaagcacgtggtttgaaactaaatcatcctgaggcattagctttaatcagcgatgaattattagaaggtgcacgcgatggtaagaccgttgcagagttaatgagttatggtagacaaattctaaacaaagaagatgtcatggatggtgtcgaacacatgattacagatatcgaaatcgaggctacgttccccgatggtactaagttaatcacagtacatcaccctattgtttaaaggaggcagtcaaatgataccaggagaaattattacaaaaagtacagaggttgaaattaataaccatcatcctgaaacagttatcgaagttgaaaatacaggagatcgaccaattcaagtgggctcacattttcatttttatgaagcaaatgcagcattagatttcgaacgtgaaatggcatatggaaaacatttagatattccagctggagcagctgttcgatttgaacctggggataaaaaagaagttcaattagttgaatatgctggcaaacgtaaaatttttggttttcgtggtatggtcaatggtcctatcgatgagtcacgtgtctatcgcccaactgatgaaaatgatgaatatgcaggtgtattcggagataacggtgctgaaaacgtgaataaaaaaggaggaaaaagatcatgagctttaaaatgacgcaaaatcaatatacgagcttatacggtccaactgttggagattccattcgtttaggtgatacgaatctatttgctcaaatagaaaaagactatgcggtttatggtgaagaagctacttttggtggtggtaaatctattagagacggtatggcgcaaaatcctcgtgtaacacgtgatgacgtgaacgttgcagaccttgtcatttctaatgccgttattatcgattacgataaagtggttaaagctgatataggcattaaaaatggttatattttcgccataggtaatgccggcaacccagatataatggataatgtcgacattattataggttcaacaacagatatcattgccgctgaaggtaaaatcgtcactgctggtggtattgatactcatgttcattttattaatcctgaacaagcagaggtcgcattagaaagtggtattacgactcatattggtggtggtactggtgcttcagaaggttctaaagcaacaactgtaactccaggtccatggcatattcatagaatgttagaagctgccgaaggtttaccgattaatgtcggttttacaggtaaaggacaagcaacaaatccaactgcactcattgaacaaatcaatgccggagcaattggattaaaagtacatgaagactggggtgcaacaccatctgctttgagtcatgcattagatgttgctgatgaatttgatgttcaaattgcattacatgcagatactttaaatgaagcaggatttatggaagacacaatggctgctgttaaagaccgtgtacttcatatgtaccatactgaaggtgctggtggcggtcatgcgcctgatttaattaaatccgctgcattttcaaatattttaccttcatctacaaatccaactttgccttatacacataatactgtagatgaacatttagatatggtaatgattactcaccatttaaatgcggctattcctgaagatatcgcattcgcagattcacgtattcgtaaagaaacgattgcagcagaagatgttctgcaagatatgggtgtattcagtatgattagttccgattcacaagcaatgggccgtgtaggtgaagtaattacacgaacatggcaagtagcacatcgcatgaaagaacaacgtggtcctttagatggtgattttgaacataatgataataatcgcatcaaacgttatatcgctaaatatacaattaacccagcaattacacatggtatttctgaatatgtaggatctatcgagccgggcaaactagctgacattgtcttatgggacccaattttctttggggttaaacctgaattagttgtaaagggcggattaattaactctgccgtaaatggcgatgcaaatggttctatacctacatctgaaccgatgaagtaccgtaaaatgtatggtcaatacggcggaaaccttacaagtacgtcaatgacattcgtgtctaaaactgcttatgaaaatggtatcaatcgtgcattaaatttaaaacgcatggtgcgtccagttaaaaatattagacaattatctaaagcagatatgaaaaataacagtgcaacacctaaattagacgttgatccacaaacatatgaagtatatgtagatggagaaaaaattacaagtaatgcagcaactgagttaccattaactcaaagatacttcttattctaggaggaacatagaatgattgttgaagaaatccaaggcaatattgccaatttgtcaaattcagaaaaacaaaagcacgtcgaaaaagtataccttgaaaattcagatcttgttaaacgtattcaaagagtcgttacagaccatggcactgaaataggcattcgtttaaaacaacctattgacttacaatatggagatattttatacgcagatgaccataatatgattattgtggatgttaattcagaagatcttttagtgattcaaccaagaacattgcaagaaatgggagatatagcccatcaattaggaaatcgtcatttgccagcacaatttacagagactgaaatgctagtacaatatgattatttagttgaagatttattaaaaagtttaggcatcccatatgttcgagaagaccgtaaagttaataaggctttcagacatatagggcattctcatgattgatcatacacacttaagattatttcagttctgtgattcacagtttccaacaggtgctttcagtcattcatttggtcttgaaacatatattcaacgaaatataattcatgacgatcatacttttattgcttggttaaaaatgtttttacaagagcaacttacctattctgatggtttagccatgcgtttagtttatgatgcattggaaaatgatgatacacaaaaagtattacacatagataaactgatgtttgttcaaaacttacctaaagaaacacgtgttggtgcaaaacaaatggggactcgcatggttaaattggctttagaactttataatagcccatggattgcttggtatcatcaacaaatgcaagataagaaagcaaagttaaatccagctatttgttttactatgctaggccatcatttaggtgtagatattgaaacgattattgattactatttatatcaaaatgtttcaagtttaactcaaaatgctgttcgtgctattccacttggacaaactgctggtcaaaagatagttactcacatgattccttatatagaaggaacaagaaagcagattttcgaattaaaagaagcagattttggcatgacagcgcctggtttagaactaaatcaaatggcgcatgagaacgtcaatgttagaattttcatatcataggaggttataattgtggcaaatccgattaaaattggtattggtggtcctgtaggtgcaggtaaaacacaattaattgaaaaagttgtaaaacgtctttcaaaagaaatgagtatcggcgttattacaaatgatatatatacaaaagaagacgaaaagatattagtaaattcaggagttctacctgaaagtcgtatcattggtgttgaaactggtggatgtcctcatactgcgattcgtgaagatgcatctatgaactttgcagcaatagacgaattattagaacgtcatgacgatatagaactaattttcatagaatctggtggcgataacttagcagcaacatttagtccagaacttgttgacttttcaatatatattatcgatgttgctcaaggtgaaaagattccacgtaaaggtggtcaaggtatgattaagtcagatttctttgtaattaacaaaactgatttagctccctatgtaggtgcatcattagaacaaatggctgaagatactaaagtatttcgtggtaaacgtccatttacttttactaacttaaaaaccgacgaaggtttggatgaagttatcgattggattgaacgcgacactttactcaaaggattatcataatggatgaacaacaatggactgggcaacttgatttaacagtgtttttcgatggcaatcgatcagtatcaagagatattttctttgaaaaagcacttaaagtgatacgtccagtttatctaaatcaatctaccattcctacattttatatagtaaatgtaggtggtggctatttagatggagatcgttaccgtatgaatgtgaatgtcgaagataacgctaaagtgacattgacatctcaaggtgcaacaaaaatatacaagacaccttccaatcatgttgagcagtatcaaacttttaatttgaaagataacgcatatttagaatatgtcgctgatccaatcatcgcatatgaaaatgctaaattttatcaacacaatacgttcaatctcaataattctagttcattattttatactgatattttaactcctggttattcaaaaactggcgaagccttcaagtatcaatatatgcatttaataaatgaaatttatattgaagatgagttagtcacatatgataatttattattgaatcctaataaacaatcgatcaatgaaataggttatatggaacattactctcattatggctctgcttacttcatacacgaagatgttaaccaaaaactaatcgattcagtttatgaaaccattagttcttatagcaatacattcgattgtcgtgttgctatttctcaattgcctacacatggttttgcagttagaatttttgcttatcgcacacaaattatagagaaaatacttggaaccatccaaagctatatcgcagaaaatatttatgatcgtaaacttgattttctaagaaaatattaaaataaaaagactagtgtaccttgtttcaagcttaataagctgaaataaggtatggctagtctttaactttaattaaagcatcttcaatatttaaattttaagttaattttatgtcccaatgctgaataaataacttcgttttaataaattgttatcgttcaatgttattaaacgcaattaaccttgatttaatttttaatgtattcttctaattctgaaatcagtttttgaatatttgctttttgtgtatctgtaacataaacaataactgttctttcgtcttgtaaacttcttttctttgataacaattttaaatcttttagcttttgtaaagctttagttaaatagtaaggtttgaactctgagcacttagcaatctctttagatgagatttcgttagactcacttcttaaaatatgatttaaaatataaatttcttcatagttcaaattgaacttcttttttgtatctctgaaaaacttcttaacttgaaatgttgcgttgactaaatcattaatgtcattaattttactcattattaaaccactcctctgatgcacatcttgttgtagcaaggttcacatgtaatttattaaatcgaaactctatccaactatgttataaagttcattctaaacaaataagtataaaaattcaatatttttattactagaatatggttaaatacatttatttcttataataatttgatgtttaagatattttgccaaattgaaaattattagtctgaatattttgtatcttaactgatatgtaaacttttaaaattttaatctatatcaacgtgtttgatttgatattttttatattaattggatggcttgctcacaaaatttataaaatataaaaaaagaagagctttaaatcataacgcatgccatttatctttaaatgcaatgagttatcattcaaactcttcttatcaacctacatacattgacattatactatcatatgttgttttacatattcaacaaacatttcaacgttagcacttttaatatcatgcattgggacattaccaatattaaatttgaacattatagtttgaccatcataatctatcttctctatttcattataactaatacttctataataaaattggccattcatatctacattcataattaatctttcatttgttgctataaatgccccttcaaattcattctcaccttgaacttgatactcaattattcctagcactgacggaccctttttttcagttggaaataaatcatttggattcacattatctaaaatcataatatccctcccacttaaaactataaactattcttcataggtatatgaaatacaagtgattaactatttattattaagattaacttgtattcccttttcaagataattataacatgcttgaataagcatagtgactttagaaaacttttctcgcttgattgttacaataacacgcctttcatctaattcacatctctcttttttaactaatcccttcaaaattaaacactttaaaatcgggctaaccgcaaatatcgggtgatggaattcaccctgtaattctttaaccgtcaattgacctttatgcagatttaatattcctaaaacgtataactcttctaatgataattgacacatatttaaataacactttagattccgcaataattcttgtgacgacaataaatacgatacatagtcacaactaaaatcaaatgtatattgaccaaaataacgttcaatatagtcactaagctcattattcatatattctattttatctatatgcattttattaatcgaaatagtcaatttacgttgatccctttgatctcttcctttcaatagccattgatgattgtttaaataacttaacatttgaagaagggccatcttagattggatttctttcatttttaataaactatctattgaagcgctattggaatcagaattatcatatttaactaatagatttaatagtttcacttgagtcaaagtgagatgaaatgaatatttcaacatatcattaatgactttcaacattagtatgtgtgcagttaaacgcttaactttaaatttagacatctttaaaacctctcttaaaccatgcctatatctcaagatgatatttcaaatgaacaatactattgcttgagaccattaatgaatgatcataaatatttctttctataaaattagctttccaataactgtgttgttgcataatatcattcacaagtacaccattttcggaagtatgattatctttatctatacttaaaacaatttgtttagttttagcatggctaaattgttgaagacccttacacgataaacgtatagcgtctgaattctcatttaacaatgcggctggcaaacaaatgacacattgtacttcatgtttgaacttcgttacaatcatcgtgtcattttgataaataacaatccctcgtaattgattaagtatatttatgataaaaatgaatattgataatctagttaaatttatttctttgctcgattcacttataattgacatgtgcataataagtcctcgaaattttgtataatttgtcaaaagttcagaaaccttattaatatcagacattgtgattttttcttttaagtcattattctcattaatcaaatctacatcacatataattttagaacgtgcaatagacacctgttctatttgtcttagcggtaagataaaatagtctattagatgatcaatttctttatcatagcgcgtattcaactcttttggttccagatgatatattaattcaaatactcctatataattatctattaaacgtttcagtttttgaattgcagtagtatttaagtcgttaattaaaaatgcaatcttacatctattactctcaaaagtcatattaaaaattgtagctactagcttttctatcttgcctctttcagcactcgttaacaattccttatattcatgtttaatacgaaacactacatttacattgtaattcactatcttttgaagtaataaagtgatttgttcaatcgatagctcattgcttgtgtcgattgtaacaattatatgcaagttttcaggattaacacctaatctttgaatgatttgtttaatagtataataatccatccaataaaaattacttcctttaatataaatatttttaggttgatacatttgactcctttttgtaggctcaaaaggtatatcaatctcgcgcatacttgaagaactttgattagtatcatcaaataattcaattatatttttatcaatttcaactaattgggaatggttaattgaatgagatgttggactatatctttttctaattaatttaggagtgttaccatacgtttctttaaagaggtgtataaaacgagaataatgattaaaaccatgactacttgcgatttcttcaataggcttcttagaagttaaaatatcaattaagcaatgctccagtctaatatgatttaaatattgaataaaattactataaggtgtcgctttaaacatgtcacttaaagctttgtttgtaatactaacttgattaatgacatctttcctatttatctttttatggtggttgtttgttaaataatcgtgcacttcttcggctactaaatgacgactaccatcgtatgtatttaatgacattaattcaacacacatgtaattaataatcttatcattagcattataagactgttgtttaattttgctgtagattaaatacttaatcaagattctaaaagtgctagcaacctcatttgttaatatcttgccacgcatcatatagtttgcattcataaacttcaaaaatgtctttgcacttacttcaacaacacaacatacactatcatcattaccatcaatttgatacaaatcattcaacataataatggtgacatcatttctttttacatcatattgttgtagattgattgaaactacacctgtaccttgtagccaatatataatttttaagttcgcttccttcacactactcattttcatacttttataaatatgtagtgaataattatctgtcatcttacatcctcacatatacaaatatattgatttactcctgtttgtctttctcaaatcaattgtcaacatctaatattcactaccaattatatcgccacatgttttttagcagtaacaaaacataaatcgattatatcaaataatacttttattaaaacatttttttatgctaaattaggatattttatccattaaatatacattttcatccaaataccaaagctttcataatcatagaaacttgatcgttcgtgtcgaatttttatgcattttctgattaaaagtcctatattatgcacaaaatatacatttagaattttcagtaatattacaaatttgtaacagacttattttcgaaacattcagttttcacaaagaatgccgtagttataagttttgcaaaatgcaaatttctatacttttaaaattctattgtgtcaagatattagcaaaaaattacaaaacgttaacaaagcacacaaggacgctaatttctgttatagtctttcttgtcgtttaattacgagagataacttataacattaattttgtcacacggacattacgaaaatattttagatttaaaatttttaggaggatatttttaaaatgaagaaaatcgctacagctactatcgcaactgcaggattcgctacaatcgcaattgcatcaggaaatcaagctcatgcttctgagcaagataactacggttataatccaaacgacccaacatcatatagctatacttacactattgatgcacaaggtaactaccattacacatggaaaggtaactggcatccaagtcaattaaaccaagataatggctactacagctattactactacaatggttacaataactataacaattacaacaacggttatagctacaataactacagccgttacaacaactactcaaataataatcaatcatataactacaataactataatagttacaacacaaacagctaccgtactggtggtttaggtgcaagctacagcacttcaagcaacaatgttcaagtaactacaactatggctccatcatcaaatggccgttcaatctcaagtggttatacttcaggacgtaacttatacacttctggtcaatgtacatactacgtatttgatcgtgtaggtggtaaaatcggttcaacttggggcaatgcaagtaactgggctaacgcagctgcaagagctggttacacagtgaacaatacaccaaaagctggtgcaattatgcaaacaactcaaggtgcatacggtcacgttgcatacgttgaaagtgttaacagcaatggttcagtaagagtttcagaaatgaactatggttatggcccaggtgttgtaacttcacgtacaatctcagctagccaagctgctggttataacttcattcactaattagtgatggctatgtttacgccaacaaggtttcaagagccttgttggcttttttaatttctatgaaaaaaatcgaattggtaaaaatctcaaaatttcgattttcaccaatccgattcactctgtaataaagaataaacaacatacagccattgacacacccaaatttaggcatgtcaaatcggctatacattgataaatttttagttaaagtacttacaaatatacttgccttcaaattctcaattaatttagtcattacaaatcatgacataaaacttacattacatatatcaacatgttccgctacaaaacatattcagtatatgtatagaggatatttattctaagttaaaaccttttcaaattataaccgctacaattataaatgattaaagtgtttcaacatattatatatattccacgctcacattaagttaaacgtgaattcgatgactttttaatacctatccctgtaaaaccatagataattgctataattgcgcataaataacatggtactgtccatatgaaaaattcttcaacagagacatgaagttgattcgtatagtaaatacctgatgttccccatggtattaaaggtaagaccatcgtacttgagtcttcaagtgttcttgataaaacggaacgagagacttggtatttttcgaacaaatctttcattaacacaccgaccataataattacaatcgaagcaacacctgcagcgaatacaagcgcaatacaacaaataacagtaatacatattaaacttcctacagaatggatgcctttagaaatagtagttaataagacttctaaacatcctgctttttctacaatacctgcaaatgcatatccgcaaaatatcgttactaatatttgggtcatactcatcataccaccctgttctaacaagcttttcacactggatgaaatatgagactgatgtatcattgattcgttaaaaccactaaatgttgctttgaaaccatctgtcattttgaaatgatgattaaaagtccccactataatggcagaaaagcttgatattagcatagctggcactgtagccattttaaatagcaaacaaacaatgatcacaattaagggaacccagacccatatgttaatttgataaatctgtgcaagctctgataacaaagtttgaatctgtttatcatttgaatgccctttaaattgaaatccagcaataaaccatactaataaacctatgattgatgcaggtatcgtcgtccacatcatcgaatgtatatgtttaaatatattaactttagtaacaagcgccgctaaattagttgtatctgataatggtgacattttatcgccaaacacagcccctgctataatagcacccgctgccatccctggaggaatccccaattgattaccaatagaaataagtgcaatccctgcagttgatgcagagccccatgctgtaccagttgctacagatgtaacagcacttataaaaaaggctgatattaaaaaatagcttggattcaataaatctaagccataataaatcaaggctggcactgtgccagaaaacatccaactgcctactataattcctaccgctagtataattaaaattgcaggcattgcagtatttaaacgttctgcaatgcctttttctaaatcttgccatgttaagcctacacgttttgcaatccatgtggcatatgctgaggcaataattaataatacttgaattggaatatcaaaaaacacaaagcctgttacaacaacaataaccattacaatcattgtcgaaattgattctaaaaaggtgggttttcttttcatcatctatcgtccccttcgcttattgatgagaaacctcttttcttcaatttattgcttttgcataatgctatatccttttctatcttcaagccatcatttattttaaatatttttctaaatcaagcttatctaaaccaatttcttcaactgttaagccttcctcaaagaagtctctctctaaaatggttgatgcaattacaattactgcatctatatttggtgtcggtacatcaataacacgacctaagcttgaccatagtactaaaccatatgcaatatcttcagttaaatatctgctttctacatgatttggtcctggaatttgtgaaaatactgggcttgtattaaacaaacgatttaatggttcatcttctttatcacgttctaaataaccacgttcaatacgtgattctttagctgttgataattcaaaacctaatctacggcctaaattcaaacgttctaattcgattgcatgaagtaatctaactgtatgtttagtaattccttctttatataaagcgaactcgccagcataatcaatgcgaccgacattcaataatgttggtcctggatgcacttcaggattaccattttcaagatttgttttaattaagctttcctcttttactaaatgatcataaatacttgaaactttgtcataacaatcatttagacagcttctatcatatgttgaaaagaagatacgacgtacatttagagataaatcaactgctgcattttcaaaatcgacacgcgtaccatacgtcaacgtattagcttccgctagttgtggttttgtttcaatatgtctatcttctaaaacattcataaaacgaattgaccccattgctgcagccatgttgaagaatatcaactgattatcagttacatgctctgccattacatcagcataatactctatgtatgaagatggaataatcacttgaacaatttcagcatcttttaaaacatattccatatcatcactaatatcagtgaattttacgaaacgttcatcaccttcattattaaaatcaaatccgcccttttcgattgcgttttgaaacttacttatagattgattacgacaatataatttaacatcgtggcctttgctcaccatatctactgctgccgtaactgcgccatttcctgatcctacaattgctattttcataaacaaccctctttctatctttggttaaaattaaaaacaaattatacgtaagacaatataaaaatgatgcgaattcattacgcatcattataaatgttaagtatatataaccttaaattaacctatttaaacgccgacgtccaccaattatttttatttttaataattgtttaataaacatgtttatttttgattatattttgttatagttaaagataatattacaattttcaaaggagtgtctaatatgacaactgaaatgaacgacgtaacaaatcatcaaccgaatcgcaaatccaatgatgagaacattatggcgatgcttatctatttattaagtttattcacatctattattggtccactgataatatggttattgaaaaaagatgaatcgaaactagttgatcgtgctggaaaaaattatcttaactatacgatttcttatattatttggtctatcgttttagtcgttatcactttaataggcgttttcctaattgctacagatattgatttcattattattataggtttcatcattacgtttatcggtattttatccatattcgctttctcaatattatcttttgtattcacaattattgcgtgtgtcaaatattataatggccaagaatatataatacctttaacaattcgatttatttaaacatattacaaataaatatttcctattaattatctgttaatctcattgtaactttgactaatttttattacaaaattagtcaaagtttttttattcttttacaaatcaataacattccccacaagaagcattaattttgttaaagtaactattgtcatcaattcgagatgtgagaataaaacagtcgctacgttttatttataaaaaaagatatagaactttggaggactttattcatgaaaaaattagtaacagcaactacgttaacagcaggaatcggcacagcattagtaggtcaagcacatcatgcagatgctgctgaaaattatacaaattacaacaactataactacaacacgactcaaactacaacgactacgacaactacgacaactacatcatcaatttcacattctggtaacttatacactgcaggacaatgtacttggtatgtatatgataaagttggcggagaaatcggttctacttggggaaatgctaataattgggctgctgctgcacaaggtgctggattcacagtaaatcatacaccttctaaaggcgctatcctacaatcttctgaaggaccatttggtcacgttgcatatgtagaaagtgtaaacagtgatggttcagttacaatttcagaaatgaattatagtggcggacctttctcagtaagttctagaactatttctgcaagtgaagcaggtaactacaactacatccatatttaatataaacacgatgatacatattgtcttgaaacttaattctagtacatatgtcatcaaaaaactttgagctttcctttataggagaagctctttttttgctatttttcgttgccacctacttatttatatttcctcccatattcaaaatattaattttttctaatactattaactttaaaactacgttatctaatttaattgatccagtttttccacattacaatattcatagttctacagtgcctaagttatatcacctccatcaaaagtacacgcttacatcattgatacacaagacatcatgacatagttgtatactgtctaatcttctactatactaagataaaaggagtgatcttttatggaaaaagtttatgttgctggtgcaataccagaagtaggtttaaaacttttacaagaacattttgaagttgaaatgtatgaaggtaaaggattagtcgataaagacactttaattaaaggtgttaaaaacgcgactgccttaattagtttattatctacaaacgttgataaagatgttatcgatgctggtaaagacttaaaaatcattgccaactatggcgctggttttaataatattgatatcgagtatgcccgagaaaaaagtatagatgttacaaacacacctaaagcatcaacaaacgcgactgctgatttaacaattggattagtacttgcagtagcgcgtcgtattgttgaaggggaccaattatcacgtacaactggatttgatggatgggcacctttatttttcagaggtagagaagtatctgggaaaacaatcggcattatcggtttaggtgaaattggtagtgcagtagctcgtcgtgcaagagcatttgacatggatgtgctatacactggacctaatcgcaaagaagaaaaagaacgagaaatcggtgcaaaatatgtagatttagatacactattaaagaatgcagattttatcactatcaacgctgcttataatcctaaaatgcatcatttaattgatacagaacaatttaaaatgatgaaatctacggcgtatttaatcaatgcctctcgtggtccaatcgtgcacgaacaagcactagtgcaagcattgaaagataatgaaattgaaggtgctgcacttgatgtatatgaatttgaaccagatattaccgatgacttaaaatcacttaataatgtagtattaacaccgcatattggtaatgctacatttgaagcacgtgacatgatgtctaaaattgttgctaatgctgcaattagtgccgttcaaggtgagaaaccacaatttgtcgttaactaataattgaatttattataataacattataaaaacaagaacccccatatgttgagctctcgtttcaacatacgggggttttcatattgttgtattatttttctttcgatttatataagaatttagtttgtccagctgctaatgcatttggcatcattttcataatacgatttctaactgcaacaaataaacgactacgatattgggcaattttaccgatttttctagaacgcttaattacttttgcagtatgtttgacacgtattttatcataacgctgtaatgctttttcaaagtcgtatgcgttaaaacaatttactaatacgatagcatcttccattgcttgtccagcaccttgccccatattaggcgttgtcgcatgtgctgcatctcctagtaaaatagtacgaccataaacaaaagatttgagtggtttcaaatcataaatattatgcaataagatacctgtttcactttgtttgtctaagatctctctaacttcatttggatagtgattaaagtatgcttgcaaatgaggtttaccaaacgaactatatttatgattgttttccttcgagttaattgtaatgaaccaatatgcttgattatttaataacggaacaatacctactcttccttttcttccccagtattcttttgcacaatctggatgctttaaatcaatatcatcaattaaacctctaaagcatgtatacccttgatataatactttactgtcagcatttacagattgtctcactttagaatgaattccatcagcaccaatacataaatcaaatgcttcactttcttgttccgcgaaatgtatggtaactttatctgtctcattatctatatgcgtgacttcatgatttgtaaatattgcgtcatcttttacataagatttaataatgtcaattaatgtttggcgtggtaacgtcacattcaatgtattactttttaatttaacagtagttaacaggcgatctttgtcatctaacactgtcattgtagataagatttgcccagcatttttaatacctttagctaagtcatgattacctagttttttaagcacattatctccgataccaatcccagcgccaatttctttaactgactcatttttttcaaagactttaatagtatgaccttgttcttgtaataatgcagcagctgttaatccaccgatgcctgcacctataattgctatcttcatattgtcacctctatatttttcattcttttctattttatcacatgcactattgtttaaaaatgactcttggaactaacgtttcatttttaaggacttaagtgtattatctgcaccattgtatattacatgcacatttagacagcaatattcatttacatcatgtacatttgtaacaatgatgtgggatatagcatatttgatgctatatagcgttttttgttaggttaaaatccatttaactaacacactcagaatgcgctaaaggagctcgaaacaataaattgttccagctcctttaagcaccgatgtcttatttataatatgtttgtctaatatcatctttctttataccaaactgcttataggatttatccattaatttggcaattttatctgcccagcgaatgtcactcgcatattgatgttgcgcaggattttctggattccatcgcatttgatataaattcagttgattgttttcaaaatattcattacgaatgaactttgcaccaccaataatcgccttatctggtgatgtccattgttccttttcagcataacttttcccactacgaacagcactactatcgaatgctcctataccaaaaaagttgtaatagcgtttttttcccatctttaatgccttttgctaattctgatttgccgttacctgtttctactaatgcatggctaacaagataaatgacattaacctcatatttttcttgagcttctagaaaaactttccctcgattttctaaaatccccttaccttttagcaattggttaacttcagattccgacattggcactttttctgtgatatccatatacttcatatcattgtctttatgtgaaatagtcattgctttagcaatttcattattatttgcttcaacaaatttaccatcctcttcttttgtctgtacaatacctttcccttgttgcattgaaacagcctcatcaaaagagtaattcacatcatttttaaacaatttagtttcattcacgatgagtaatacagcaaaaacaactaaaataactatcaatagtagcgttgaaatgcgtaacttgaaattcttcttcatatagacaaaacctcatttttcttacttagacaataaaaaatatgccactacaatcgctaatattacgattaaaaaagaagcgttaacgattactttcatcgttgttctatctctgaacatcatattaaagacaactagactaattgataatgaaacagcaaaaaaagtaatagctaacactaatttcatcataaatagacagactaaacctatgactaataatgtattagaaattacagctgacgtttttaacattctcgaattaatatgcactcaccctttttatttaaataacttacataatcataataatacatgatgtttcataggcctgtcgatgattgattcacaatagcacgtgatttttttgtttttcaatattattcatttattccatcaaaaacaccctttttaatttttacaaaaattaaaaaaagtgctcctacactgcttgcatgtagaaacactttttcattgtaatgttattcttctcgagacataccttttagcatattaagcatgtatgttaaactacggttcatgtcgtcatctttcaatacgcccaatagacttcttatagttgtcttagcatttggactcgcttgattggcaacgtgtaatcctttattaactttatttaggaagtcgcttaaatctgatacattgagttcacctaataaaaataccattgaagccatattagataatagccctgtataaatatctttattaagttcaactgcaaatttatttatgatgacttgacgtcctcgaattgcaccatttaaagcatctaatagttttgcatcatctaatgttttaataagcttgattgcttttaatatactatctttattcgctgcaattgcctctgtaacttcatttaaactttctaacttaatttgttcttctgatttttctaagcgtctaattttagaagatattctctcagccattatttatccacctgatttcccgggaaaacataatctgaacgttcccattttttctgtacttgaacactgtactgcggttgacgttttttattgacacggaaattattagggttcaacggtgacttaccacgtttcgtaattacctccaaacgacagctagtacgtttataagatggtgtatccgtgtattgatcaacatcactattagttaataagttaattgcacctagatctccattttccatcgcatcattatttaatggaatatagatttctttacctttaacacgatctgtcacgtgaacttgtaataccgcttctcctgtttcagaaatcagcttaacttctgcaccttcatgaatgcctctatcttcagcaagctctggagaaatttcaacaaatgcacgtggcactttgtatttaatcattggtgtttgataagtcatattaccttcatggaagtgctctaacaatcgaccattgtttacatgaatatcataaatttcatcttgcttaaagtaattatcaaatgataatgggaataattttgctttaccattatcaaaattgaatccttctaagtatagaataggctcatcagtaccatcaggttgtactggccattgtaaactattgaatccttctaaacgatcataacttaccccagcatatagaggtgttaagcgtgctacttcatccataatttcactaggatgcttgtaattccaatcaaatcctaatctattagcaattgcttggaaaattttccagtcaggttttgaatcaccaagaggttctaatgcttggtataaacgttgaatacgacgttcggtatttgtaaaagtaccgtctttttcaagtgaaggacttgctggcaatacaacatctgcgtatgttgctgtgaatgttaaaaattcatcttggactaccatgaaatctaatttttcaaacgcagcttgtacaaaattaatatttgaatccacaatacccgtatcttcaccatataagtacaatgagtgtacttctccgtcatgtataccttctaccatttcatgattatctttaccagcttttggattcaatttaacgccatattctttttcaaatttagcgcgaatatcatccgcttcaatactttgataaccagtaatcttatcaggcatacttcccatatcactacatccttgaacattattatgtccacgtaatggatacgcaccagtaccaggacgacgataattacctgttactaataataagtttgaaatcgctgtacttgagtcactaccaatgtcttgttgtgtaatacccattgcccaacaaattacaacagattcagctttagcacattcttcagcaaatttaatcaattctaattcaggaatacctgttgcttcttcagcaaaagccattgtaaatgtttctaatgatttgtaatattcatcaaaatcatctacccactcatcaataaatgctttatcgtgtaaatcatgatcaataatatacttagtcactgcacttaaccacgctaaatccgtacctggtttaggttgataaaaacgatccgcacgttctgccatttcatgttttctaatatcaaatacatgtattttttgaccaaataatttttgtgcacgtttcatgcgtgatgcgataactggatgagcttcggctgtattagtacctatcaatacagacattgccgctttttctaaatcttcaatactacctgagtcaccgccgtgtccaaccgttctaaataagccttttgttgcaggtgcttggcaatatcttgaacagttatcaacgttatttgtgccaataacttgtcttgctaatttttgcattaaatacgattcttcattcgtcgctttagaagaagaaatgaatgatagtgcatctgggccatgcttttctttaatagctgtaaaattatctgcaatgacgtttaaagcttcatcccattctacttcatggaactcaccatttttccttactagtggtttagttaatcgttgatctgaattaatatgtccccatgaaaacttacctttaacacaagtcgcaattttatttgctggagaatcatgtgatggttgtacttttaaaatttctctatctttagtccaaacttcaaatgaacaacccacaccacaataagtacacactgttttagttttcttaatacgctctttacgcatttctgcttctgaatctgagattgcaaatagtggaccataaccaggttctgcttttttagttaaatcaatcattgctgctaatgaaccaggttccgtatcagtcatataacccgcattaccttccatattcacttccatcatggcattacatggacataccgtcgcacattgaccacaagatacacatgaagactcattaatcggtacatcattatcccaaataacacgtggatgttcacgatcccaatcaattctaatagtttcattcacttcgatatcttgacatgcttctacacaacgcccacataagatacattgatttggatcataacgataaaatgggccgtaatctttttcgtatggcttctctttatattcatacgtttgatgctgaagcccccatgcatccatcgtattatgaatttcacaatcaccattattataatcacatactgtacaatacagcatatgcttttctaaaattcgatcaagcgcttctttttgagcatctttcacatcattgttcacagtatttacagtcattggacgatcaatcaccgtactacatgaacgttcaattttaccgtcaatctcaacagtacatgtatcacatgtttgaattggtcccatcgactcgttataacaaattgaaggtacaaaagtatcttgtgatttaataaattcaagtaaattcgtacctggttctacaagataatcttttccatcaagtgtaaccaccaaatgttcttgcatattactcaccccgtctatatatattttccgtaaatgacttttaataaattgctcatatccacctaaaataacgatgccccacacatctttcagatagaattaatttaattgtattactttatgtactagttgttaagtaaaattttgtattttgcctttttacaatcatttttatttgaaatattttgcgcgaaattaaatcatctttttgtttaattgaaaataattatcattattagttttccaattatctgtttcacgctttttgccatatctttcacaaccttattaatgacaatatttaataatcacctcacctaaaaatcgttatactatttataaataccctttttctgaaaattaataacccaagtttgataaatatctactatcatttagaaggtaatatttatctttaaattaaatttgtaatggattaatttataaaaatcaaatcaggcattaaataaaatagcccataaatacaaagtgttatcaccttctatttacgggctattagttctattcgttattctatttacagatcattctatctaattaatttgtgtacaattttgataacttattttcccttagtttactactctagattatcttttaataacttagtactttcagcttttgactgctcactaggaatgaagtagtacaatccgtcactttgaatgccgccttgaccactcaattgatgtttattaatcgtgtcattagcatctttataattgcttctaatcgtattcaaatcacctaatgttaaatctgttttaacattattttgaatttcattcattagactattaaaatgtgtaatcgatgatgggcttgcaatcttattggccatcgcttcaagcacaatttgctgacgttgttgtcgaccaaagtcaccaccagcaccttcttctttacgacttctaataaacttcaatgcttgatcaccatttacatgtgtctgctgtccttttgtaaaacgaacaccatcaacagtgaatgtatcattacttactacatcaacaccgccgatgctatctatcatattatgcaaaccatccatatcgattgtcgcataatgatcaattggcacattcattaatttttcaagtgatttaacagccatatttggtccaccatatgcataggcatgtgcaattttttcagtagtaccacggccaacaatttccgctcttgtatcacgcggtatacttactatttcagttttcttcgttttagggttgatagataaaatcataatactatcactacgctctccgccaccctttttcttacgatcagcatctgaatcgacaccaaataaagcgattgtgaatggatcaccatcgtttaaactcacttttttatctcttaattctgaatgattgcgatctaacggattgtgtatcttattaccagtaataaaaattttagcagctacatacacaacagctacaatcgctaagattactaaaataccgaatacccataaaaatatttttttcggtaggctcattttacttttagacgaacgtttcaatcccaccactcctttactattccttacatactttgtctgttttctctatttattatatagtaaaataatttttttactatacttctgtagacgtataactattttttatcattttttatctctagagaatatctatctgtatttttgataaccaccatttgcatttaaaattttaagtaccgtttcatgacatgctttattacttataataaaaggtgcaccctttaaatgatcaattgccttaccatctaaagtcgtcatttttagattcaatagttctgcaaataaaaactgtgcagcaatgtcccaaggtttaggatttgtattaatatgtgccccaaattgaccttttgccactcgcatagaatctaatccgcaagcaccaactaaacgataactaaatgaggcgtcaaataaatcttgcaccgtatctagattcatcacttgtgcattaaacgatataatagcgtcttccaattttaacgatggtggttcttccatcttaattccattacaaaaagcaccttctcctcgtattgctttataaagctttttatgcggataatcatatacgtacgataacattggtttaccttcataaaaatacgccaatataatacaataatcttcttgctgttttactaaattggcagttccatcaatgggatccataatccataaatgattaatttcattcgtaatcatttcattacttttttcttccgctaatagttggtgttccggaaaatgtgttgctaaaaattgttggaattgttgttgaatctgtttatctacatttgtaactaaatcaaatcgatgacgcttagtttctgtagtcatttccataattaattgcggaataacattgtctattcgtttcaaccacgaacatattaacttatctatttgctgtaatgttttatctgtcatttcgtccaccacttctcatatcattatcattttattattaccctatattaaaagaatcaacaatacaactgaagacttcttcattttatgcataaaaaaatcggctagtcacgtgctagccgacaaatagaaaggaaagtaagtaataaatattgaagatgttgtgatgtaacttgaacgattaaaagctatctgttatatagctctacccctttgtttaatcgctccccctgttacaagtaatatcatagcacaatcttttttaaaatgtaagcgttttccacaaaatttttacgattttttttaaaagatattgaaaatgtcctcattgtcactcttatgttatactttgtgtaatatatcatcttttaggaggtggctgtcatgaataaagctgaaaggcaaaatttaataattactgcaattcaacaaaataaaaaaatgaccgctttagaattagctaaatattgcaacgtatccaaacgcacaattttaagagatattgatgatttagaaaatcaaggtgttaaaatttatgcgcattatgggaaaaatggtggttaccaaatacaacaagcacaatctaaaattgcattaaacttatctgaaacacaattatcagccttatttttagtgcttaatgaaagtcagtcgtactcgacattaccatataaaagcgaaatcaacgcaattataaaacaatgtttaagtcttccacaaacacgcttaagaaaattgcttaaacgcatggacttttatattaaatttgatgacacacaacatatgacactcccaatgctgttttccgacattttaatttattgtacagaacgaaatgtgatgttagtagatcatagggttgatgataatattaaagctgaaaacgttatatttattggccttttgtgtaaacatggacattggcatgcagtcatttatgacattgctcaagacaaaactgccgaactcgaaattgaaaatattatagatatttcgtattcattcggtaagacgattcaaaccagagacatatccattgataactatcatcaatttttaaaccccatcgattcctaaaaaacagcagtaagatgattttcaattagaaaatatcttgctgctgttctctatttatacaatacttcgtattgaatggcttcgctttcctagggtgccgtctcagccttggtcttcgactggcactgctccctcaggagtctcgccattaatactacgtattaacatgtaattttactttgaaatacttaaaaaaataaaacactttgcccaacttacactaccaatagaaactgctgttagaattcctcaaaatgatatttcgcgatatgttaatgaaattgttaaaaagatagctgatagcgaattcgatgaattcagacatcatcgtggcgcaacatcctatcatctaaaaatgatgttaaaaatcacctcatattcatatactcaatctgaattttctggccgtagaatagaaaaattacttcataacagtattcgaatgatgtggttagctcaagatcaaacaccttcttataaaactattaatctttttagagtgaatcctaatactgatgcgctaattgaatctttatttattcagtttcataataaaatgcatatcaaaaaagctgatttctatcaaataattaatagaaatcagcttttttcattgcctaaaaacttaatgtcccgacctctttatctacgcataaatacttattactgatataacgaaagaaacaaaattatttgctatatgtaatgcaattgttgaacctaggtttcttccagattttaaataagtgaaaactaatatgatggatagtatgagatatggaccaaactcaaacggcgactttgcatcagtcacatgaataaatgcaaataagaacaccgaaacaatactcatagctataaaattaaacttcttacctaattctccaattaaaatatgtctaaatacgatttcttcaactattggacctacaatcacaattaataagaatgctacaggtaaaaatgcaggcacttcaaacattttatttagctcaagttcattggctgtttcactatattgcaaatgtttaggtagaaactgtgtcatatattcatatgtataaattaagatgagagcaataatatacgttattgacaatctaagccaatattttttgatatacgcaaaaccagctcgaagccttgatggcatcacttttaaatgaaataaataaaatgcgccaatcccaatcgtatatgctaaagcttgtgtgatagtcgctacaaatatcagattactatcgatttcataataaccaaacaaaattggtcctatgtaagctgcaattgtgagtgcataaaatataacacctataattggaattataagcaaatctctccatgctatatctttaaacgtgtatttctttttttcattttccactgttatatcctttcctgtttaataattgatttttggaggtacttctacatgataaacgaaactaagtatatgagacaacaaattactaatttgattcaaatcattgatacgattaaatataatactttaatgacagattggaacattcaaacgcatatttataaatttaaccaaatagttactaatgaattgaataagttcaaaggctttgaaacatcatatataataaacgaaaatcaagtttcctattatgaaattataacactacttaataaacgtcccctccgacaagtcgactatggtaacaaaattcaatatcttaatttttatcatacagaactatctaacgcattatttgcaattaaatttgcccattaacctatttttcataaaatgtcatttaaacaagttatttattaaaattcactttattacataaattatacaattaaaaagtttcttcaaattgtaaagatgcattaatcgagttataatcataatgattaagatggtagatttagtcttatataactacatttactaagatttaaatagatgagtacataatgtataaattgggaatatacagtatgacttacggtaatatatcaatatattgatatattatttgcacatgggagtatgctattttttatctatacatcttaaaaaaatttacagttttacaattcaatatcattaaacaaacaacatattcagcttatttttcattctcttacgttacaagttgtaaataccatcgcgttaaacaacaatagccaacgctaataaaatatattgcgttaaagtggagtgattaatatgtcaaacgtactaacagaaatagatagtcaatatccatatatgactaaaaatgaaaaaaagatagctaaatttatactaaattcacctcaaaaggtgattaaaatgaggtctcaagacttagcaagcttattagatattagtacatcatcagtcattcgattcagcaagaaaattactgatggcggttttcacgacttgaaaataaatatatctaaatatgttcctaaagcatcatcaatttacaatgttgaattaatgaataacgaaagcacagaatctttaagaactaaactccatacacgtactacacgcgcacttaatcatgcaaataacgaattaaatgataaaactattgatcaaatatgtcattgtttaaaacgttctgagacgatttttatatatggttttggcgcatcttttgtagttgctaccgacttataccaaaagttatcaagaataggtcttaatattcaacttgttcaagaaacacatatttttgctacattattagcaactcacaattcgaacgacagtgttattcttattactaacaatggtacgcaaagtgaaatgcaatcaatggttaaagttattgatgactaccatatacctataattacaattactagtacaagggataatcccgtagcacaggcatcaaatattgttttaacttatgggaaaactgatgaaaatgagatgcatatgggagcaacaacttcattatttgctcaaatgttcactattgatattttatattatcgttatgttgcattaaattatcacgcatcattagatttcataacacaatctaaaatggctttagataactatcgtaaacatttatcaaatattaactttaaacattaacagtcttatataaattctttaatcatgtcatataataatttatgcatcattttcaaagcttacatgtcttttatcttgtataacatacgcatatgaccaatgatttgataaggccattcaatttcttatattaaaaacaaacgcagttgattaacggattcattccatatatcaattgcgtttgttattttaataatgctattttttattttaaagcccacagtaaaaactaacgataatattgccacttataagtttttcacactacaacttcgatttaagctatatttataaaaaaatgcgcctactcataacattctttggctatttaactttaataagctagggccaagtttgtcataagataagcgcacattataatcatactattttgcttttacattatttttattatatctaataaaataataaatcgttacaatcgttaagaagatgacaccaataagcactgatattctagtttcaacattaaataccataccaaccaatactaatattaagaataagattgttaaatagttagttactgcgccaccaggcattttgaatgggtgaccttccaattcttcagggtgtaattttctaaaacgtaaatgactgaataaaatcataaaccaaggaatcatacctggtaaaatagacgcactataaacgtatacgaaaatactcttcgctccatcgatatataaaggtaaaattacgtttaataaagcaccaattaaaataccaagagatactgctacaacagtgtacaatggtacaccatttctcatgattttagtaaatattttcggcatttcacctttatgagcaagtgtataaatcatacgactcgcactgaaaatacctgagttacatcctgacattgctgcagttaatacaacaaagttaattaatccagctgcaaatgtaataccgattttagcaaatgttgcaacaaacggacttccaatgtctcctaattgattccaaggatacactgaaacaataacaaaaatagcgcctaaatagaaaattaaaattctccagataacaccattcactgctttaacgatatttttctgaggatctttagtttcacctgccgtaatacctatcagttccacaccttggtatgaaccaattacaattgataatgcaaagaagaaaccaacaataccatttggcataaatccgccatttgtccatagattagaaatacctaccgcatggccaccatttccaaaaccaaagaaaataagaccaaaaccagcaataatcattaaaataattgttacaactttaattaaagcaaaccaaaattcaaattctccaaacgcttttaccgagaataaattcgctgccattaataataaaatagcaataacaccaggaatccaagttggcaattccgggaaccaaaacttcatatattctcctactgcgatgacctcactcataccaactacaatccattggaatatattactccatgctgtcatataacctgctgcaggatgtatataatcacttgcaaatgttgcaaatgatcctgttgtagggtttaaataaatcatttcccccattgctctcatgattaaaaataaaaagatacccgcaattaaatatgcaaggataactgatgggcctgtccatttaattgtacttgtcgcacccatgaaaagccccacgccaatcgtaccaccaagtgcaatcatttgaatttgacgggcactcaatcccctttgtagttcattgttctccataacttcttaccccatctctgattgatactaaataaatccataaaaaaacttattgccgtaattatactataaattatcgattttggtacattaatatttgcataccatgcaatcgtttacagaactactatagcaggcttttgcaactttgcaaacaattattttgtgatttttctaaaaaattaaaaaagttgctcaagtaccgttgagtcacatacaacttcagctattcttggtaattatgatataattttaataatattaaaaaggagtatatcaatgttaaaacaaatactgctacgtgctacaaaaatatcggtactctttgctgtagcatttttcatcataaattatatcggtatggaaaaacctgacatcctatatttagttggaagaactattattgcaacacttgctttcatactcatttgtcttacagtatttactattattaattctccagagcgcaagattaaactcggtacgactttaccgattgcattaattattggtatcattttcggcgccatatttttaacggtacaaatcggtgtcatcactgggttaatcatcggtgtgattgctacgtttatttgggaattgattgaaaaaaataaaggaggtcgttcatcatgacaacagcattaattggtgtaattgtattaatcttactaattattagctttgtgccaaactaccgtgctatgaaatcagcaaaagaacaaggaagtaatgcaacaagagctacaattatggtaggcatagatattatcttaattgtacttatcatcgtgacgttattattaaaatatatgtaactatttaaaccaccctatctcatacataaacatgaacgttctaccatttcacatacatatggtcgtccatttaatgaggtaaggtggttttctcgttaaagtttaccttgtaatagtaaaaaatagccaattgttgcgagtattaagtaaatcattgaaccaacaacaaaagatcttacttgcacgcgaaatggtgtctgtttgttaaatataggaccaatcaccaaatttccaacgcctaaaattactggaccagctagaaaaaacaatataatgtaacccatcatgatacgcctcctatttcgtaaagaaacgcgctacaatttgatcgtaatcaatatcttttgctacataatctacattagaaaagtcctgtgcgcttgtcattttattcgtattaacaataacatctaatccagctgcaatcgcggctgttgcaccatttacagaatcttcaatagccaaacattgtgtcggcatataatttaattgttgtactgcagataaatataattcagggtcaggtttaacttgttcaacatcttctctaccaacaactacctctatataatcgtctagacctaatgctttaaaggtgggcattatttccgctttcacactacttgtggcaattgccataggaatgtgacgttgctttaaaaatgccatcaatgatttaatcgtatcaatcatcggtaatgttgtactagtaagatgatgttcttcataaagtttatctttattttccgaaccaatcgctttaattaaatggtcatgcaaatctgtagctgctcctccaatagaagaacgataaaaatcaatgcttataggatcggcattatgcatctctaaatgtttattaataacattaaataaatgttgttccgtatctattattgttccatcgaaatcaaatataactgctctatacatatatttactcctctattttttctctttatcaaagcttaacatagtccgatgaccacttcattctattagtgcaattataacttttttgaccaatactttgctaaaataggccctgttatattatgaatgaaactaaacactgcgcctggtactgctgcaattggattaaaatgcaatgctgctaatgacacagctaaaccagagttctgcattccaacttcaatactgactgctttttgatcttgtcgatctaattttaaaagacgagctaaccaatatccaatcgtataccctaatacgttatgtaaaataactactaaaaatattaataatcctgtagttaagatttggtgcttactgccacctacaactattgctaaaattaatgaaatagcaacaactgatataattggcaaagctgtagaagctttttcagcaattttacgattaataatttgcaaaacaatacctaaagcaattggaattaatacaacttgaacaactgaccacaacatactcacgaaagatacttccaaccattcatttgcaaatagatatattaacgcaggtgtaacgaatggcgctagcaacgtagagaccgtcgtaatagaaacagaaagtgctacgttagctttggctaaataactcattacattacttgatgtcccacccggacaacatccaactaatattacgccaacagcaatatcaggtggtaaatgaaaagactttgcaattataaatgctaatgtgggcataatactgaattgtagacagacaccaataattactgctctaggtgctttaaagaccattttgaaatcattaggtgtaattgttaatcccatacctaacataacaataccaagtaaataaggtacccatttacctaatgtcgcaacatgttgtgggaaaataaatccaataacagctgctactaacatccataccaaaaaactcttcgtggcaaatatactcaatttttgaaacattgttaacacatcctcgtcgataatattgaaaaatattaccataagaccagtaaggttacaattacttttctgaaaattaagattatttagtcattctcttcttattgcaaatattttatcactgataaacaattattttaaacttcattcaaaagtcttagtgaataaagaaaaaaagcgtggtaaaatcaacttgaacaaaattaagtcacctttataaatattaaacgtgtatttaatgccatgtattcctcgggaggtcctcacatgttaattgataaattcgaaacatacatcatcaacatcgccggtttaaatgaccgtactactagaaaaaaattaagtaagttatgcaaaagtgtacaattttgtgatgcgttgcaattctcaataaacaaacagtttaatcagtatgtattagaaattagcttaccaaagcaacaacttccatacttcatttcatttttaagttttcatcagtatagtattttccaagtactttcaccaaagaaaataaatgaattacttgattctgataatttatatcaatctgcaaagcgtttcgatatcaatattgatggcttgcaagatgctttcattaaagacaaagtcatcgatattatgaatatgttccaaaatcacactgatatcacttatacgttgaataagtctcatgcacatattatatgtacgccagaaatatttgctaaattgttacatacgattgcaactagaaatatcgacattctatctgccaattatagatcgtcatctatgagcaaagctcgtatatcataataaaagacacatctatacgatgatcatttacaatgattgcgtatagtgatgtgtctttttttgtattatttatcttcggacgattgatcctcaaccatttgttcaaatgcttcacgaacttgtggtactgtcatacctactacaacttggatactcttaccactctttactaatccgtgtgccatttgttgatgcgtgaaatattccgtatctgcaactttactttcatcataaacagttaagcgtaatcttgttgtacagttagtaacatctttgatattttctttgccgcctaaaccgtcgaggtaatatgcagctttgtcttcgtattcattaccagatgaagcacgtttagaatctacgctatcaccttttttatttttgtaatcttgcttagaaaataatttaacttcctcttctgttttcttacgtccaggtaatggaatatcaaatttcaaaattaagaatctgaataagaagaagtaaatcgctacaaatatcagaccgataataacttgtgcaacataagtaccccaatgttctttacctaatggcaaccagtttgttgaaataaagtctaacaagccaccacccatgttacctacaacaccaaatgcgtacattaaagtatccattgatgctgctaaaactgcgtgtaaaacaaataagtatggtgcgatgaataagaatgtaaactctaatggctcagtaatacctacaacgactgctgttaatgtggcaggaataagtagtgccgccacctttttacgattttctttaggtgtcgtagcatacattgctaaagcaatacctaaacatccaaatactttcccatttccttgaagcataaagccataagggaattgctcttttaatggcttagtactcttagcaaactcatttaaatgttgtaaccattcagctttcaagccgtgattgactactactggtccaacttcaattggtgcataaataaagtgatgtaatcctgttggtattaatacacgttctaagaagtgatacaaccatacaccgatatagcctgaagcaatgataaagtgttgcattgaaccaataccgtgctgaacagttggccaaataacacaagtaattgctgctaatggtaacatcacaaaaaatgaaatcgtaactacaaatgttaaaccttggaatacaccaaccatttctggtaatcgtttactatagtatctattgtgaatccaagtaataatagctgaaataataataccacctagaatattcgtatccaatgtggcaatacctgcaattgattttaaaccaggtacattttcaacgcctttttctaaattagcgccaaacgtatgtggccattgtgttaaaatggcatttataaatgtattaaacattaagtaacccatcaatgctgcaagtgctgcatgacctggtgcttttttagctaaagaaagtggtagacctacaacaaatacaacttccatatgcgtaaaaataacccagccaccagattctattactgaccaaaatttaaaccaaaacgtatgttgatctgctaaactccccatgattgtaggatttttaaataatgtcgcaaagccaagcactatcccaaagaaagcgaacattaataccggtacaatcattgcactaccgaaacgctttatcgcattcatcttctattccctccatatcatctttcctaacaatacatctaattagattcatttataaatagatgtcttactatttaaatataatatatagtaaacgcttacacacctacaacgacattgacgtattttgaaagtattttgtataatcagattatcttttcatatagtgaaaattttttcacgaccttatatatgacatcgttgtatttgtaatacattcgttttaaacgcataatcaaacctatatcaatacacaaatatatataatgacatacaagattttaatgtaataacgatctattacacatttattttcaaggaggttgaatatgtttttagatgaacacattaatcgaaactttgataaacttaatgataatgatttacatatcgctcactttatcaatacacatatagatgaatgtaaaaatatgaaaatacaagatttagcgcaattcacacatgcctcgaatgcaaccattcacagatttacacgcaaattaggttttgacggttatagtgattttaaatcgtaccttaaatttgaaagtaataagacacaccaattaccttctaactctatcgatagtttcaaacaagaaatcgatagtacattcagttatttagaacgcgttgattaccagcttcttactaaaaaaatgcatacagcttcaacaatatatttgtatggtacagggcgtgcacagttaaacgttgcttcagaggcacagcgtatattgttaacgttacataatcatgtcattgtacttcatgatgaacatgaacttaaaatgattttgaacaagagtgaacctaatgatttattctttattatttcattatcaggtgaaacacatgaattattagaagtaacaaacttgcttcaacttagacaaaaatactttatttctgttactacaatgaaagataatacccttgctcaaaaagcaaattacaacgtctatgtatccagtaacacattctacttaactgatggtacagactattctagcttcatcagttatcatatattctttgaaacacttgtaagaaaatataatgagtatttactacataatgatatttcaaattagaaaaaaggaagttatgatttaatggccttgagcctatcataacttccttttatcattttattgttgtgttgatgtttcgataacgtggtacatcttatcaaacatcaattcgaaaccatgcaccatggcatcatgatattcttttttcttttgcttgtattctaaattagtaaatcgtctttctttttcaactaatgaacgataataaaatagcatttgggtgccacctgtttcacgttcaaaaaattctacctcaatgacatcttgcgtttcacttagtccaggcataccgatagtcatcttaacgtattcatccataactaaagattcataaatgccttcaatcacatttactttgccattacgttgttgatctacaatacgatatttaccgccttctttaacgtccgcttcaatctctttattcgttctggctgatgtcataaaccattgtttcaacaaatctttctttgtccaagcttcgtatactaactctggagaaaatttataaagcttttcaatttcaacttcgacatgttcattctctacattaaattttgccactgttgtccacccactttcgctcttacttttattttaacgtatttttgctcagttccaaacatagatgatcatcatttttaaaagattagcgttatacggtgagtacaacatgatctgttaatataacaagccaccttacttggctacatcgatatattgttaagcattaatgtttcatttcttgactagtgttcttttttagctttggaaaattaaataaaatcgcaataagtccgcatacacctaataatataggataaatgctgtatgggaataacattaacggtgaaataccagctacaccagccgctgaaatgacttgcgggctatatggtaataaaccttggaagcagcctccaaatatatcaagaatacttgctgatttccttgaatctacatcatattcatctgcaatatttttagctaaaggacctgacataataatagagatggtgttgtttgccgtggcaatatctgcgacacttaccaaactagcaattcctaattctgcgccacgctttgatttcactttagagcgaacaaattgcaacaaccattcaataccaccattgtgttgaataataccgactaaaccaccaattagcaacgcaatcatagcaatatcttccatgcttataatacctttggacactgcatctagtagccccatccaaccgaatgaaccatctatgagaccaatgattccggctaataatgttccgccaatcaatacgataatgacatttacacctaataatgctaataccaatactaagatatacggtacaactttaattagattataatcatagtttttagcatgatttaaagaaatgccattcgttaagaaatacagaataataatcgttaaaatagcacctggcaatacaattttaaagtttactctgaatttatctttcattttcgtatgttgtgttctaaccgcagcaattgttgtatctgaaatcattgatagattatcgccgaacattgcacctccaacaactgtagccattgctagcgcagttggtacatctgtcgcttgtgcaaatccgtaaccaacaggtgctattgcagcaacagttcctacagacgtccccatagatatagaaacaaacatacaaatcacaaacaatcctacaataattaaattttctgggattaatgatagtcctaaattaactgtcgactttacgccacccattttttcagctgtatttgaaaatgcacctgctaaaataaaaatcaacatcattaaaacaatgtttgaatggcctgcacctttcgtgaagacctcaacttttttagcaaatgattcttttcgattcattaataacgccacaattaccgttatcgtaattgcaacatttaatggcattgaagtaaaatcacctgtgataatacctacgcctaaaaacaactccacaaataataacaaggggaataatgcccaagcattgctctttttatgtacttccatcctttttacctgctttccaattaaaaatacctctttctcacaaacgatgaagaaagaggttttcatgtgctttacctgcttatcttcaaaccattacggttactggaattggcacattcgagatgttgccgaggcttcatagggccagtccctccacctctctagataagtgatgcttatttacgtttacgttacaagataatccttagtacgtcaatcataaattaatcaggagtcgtataatatttttcataaacaatcattgctactgtaataataatcaaaacaataatgctaataacaagtaaaagccaccatttaagcattaatgcaataaaaatgaacacgatagacacacttactaatattaatgatatgactttaaattgctgaacacgttgcttggagatgactttcaactgtttgtttgatagacgcgtattttttatactgattcccagtatattttctaatatttgaaccaatacgatacttattgcaaatataataattggtaaaacatcatagctccctatagttaatgtataaattacaaatccaatgtaaagtaaccctgagacaaaggataaaaagtatgcgacgtatttgttaaacttaatgatatgctttttaacgttttgatgtgtaaaccatacattcgaaacgatcgcaactgctacaaataatgtgaatactatatataatggtaatttttgttcaggaaaaacagtcgctattccaaaagctaatgctaaaatcaaaaataatatagctctagatactattaatgccataataacaacccctttgtttaatatcgagtttgcaaatttacgtttatcagcgtttctatgatcagtacttctacgggtagcgtttctatgtaatttacatcatcttaacatataaatacttcgctatttaattgaaaacatatcctattattctttgtccgttctgacgtttaatatctagccttaggcatttcacttgttaatgaatttaactttcttccactaaccgtccctaaacccaatcccgcaacagtttttaactttttcgttgttgtcctgacatcctcattaagaaagtttattctgcttaaaacttataatccacaccctgagcaaacgctccttatgacagagtattaaaataagccgataaagatacacacctttaccgactatttaaaatacacttcaccaattcattttaatttaatggattgaagtaactaaattaatattatgttgttcaattaaaagcttcatacaaacctaatctatttgcactccaccgctaacaccgaacacttgtccggttgtataacttgattcttctgacgctaatagcacataagttccacataactcaacaggttgacctgcacgacctaaaggtgttttttgaccaaatgttgggattttactttgaggttgtccaccagaaatttgtaatggtgaccagaatggaccaggcgctacacagttcactctaattccttttggtcctaattcttctgaaaaacttttagttaatgaaataattgctgcttttgaagcggcataatcatgaagaataggactaggattataaccttgtacagatgatgtcgttgtaattgacgcacccggttttaaatattccaatgctttttgaactgtccaaaatagcggatagacattcgtttcaaatgtttctgtaaatgcctcagttgtaaatccatgaatatcatcatgatactgttgatgtccagcaactaaagtaacattatctaagccacctaattgttgatatgcttgttcaacaaggtcatagttgaactgttcatctcttatatcaccaggaattaacactgccttttgaccactttcttcaatcacttggcgtacttcttgtgcatcttgttcttcactcggaagatagttaatcgctacatctgcaccttctttagcatacgcaattgctgctgcacgccctattgctgagtcaccacctgtgactaatattttatagccttgtaagcgttgatgaccttggtaagacgtttcgccacaatcgggtgctggcgtcatttcagattgtaaacccggtacctcttgttcttgtttttcataatccgttgttttaaattttgttctaggatcttgagctgccatttttttacatctccttattcgcttaatggttattatttacccaatcttcctaggaacttaatcatgattacactaaaaattactttcttctttataaaaacaagctcgaattattcatgcaatagtctctttacaaattcaacaaaatactcaggtactttttccagaatcctttcatccggtttatattgaggatgatgtaaatcatattcactatgagaaccaattaacgcaaatacacttggaaaatgttgactataacctgaaaaatcttctccaatcgtaagcggctgttccatcatttccaccttatatccaacatgttgggctactgcaattgctttatgcgtcaatgcctcatcattcatcacagcgccaggtaaatgcgtataatttaaattaattttcatattatatgcttgagccaatccgtccgcaatatcttgtaatcgtgtttctacaagctttcgtaccacaggatcaaaactacgcactgtgccttgtacatacgcatgatcagcaatgacattccaagtattaccacatgatatttgtccaattgttactaccgcttcatcaaacgcagatagatttctactaactatggattgaatactattaatcaattgcgccaacacaataactggatcgttgcattgttctggctttgcagcatgaccacccacgcctttaatatgaaactcaaaacgatctactgctgatgtaattgcccctgttttgattgcaaatgtacctaccgaacgcgatgggtcattatgaaaacccaatactgcttgtacatcttttaatgcatgtgtttcaataattttaaaagcgccatgtcctagttcttctgctgattgaaaaatgaatttaacacgcccagtaagagtgccctcaatttcttttaattttacagctgtagccaaaatactagccatgtgaatatcatgaccacacgcatgcataacaccttcattttcagatttaaaatcctgttcaacaagctcttgaatcggtaaagcatcaatgtcagcccgaacagctatacaactcagaccttgtcccacttcagcaacaagcccagtcgcaagtggtaagtctaatattctaatatgatgttctgttaaaatatctttaattttttgtgtagtcttaaattctttatcggatagttctggaaattgatgaaaataccttctccaggtaacagcttgatcttttaatcccatcggtcattccccttccttaagtcaatgatatgttgtctaccctacgatgatcatctttgactattaaacgatgatttcacaacaatgtactcttgttaattgctttcgttaatgatagacagttgtttaataatatcgtaacactgttgtcaaactattctaacttttataattgagactctatacaaaaacgtgttctcgaatatacttgtttttacaaaccacaaaaagctctaaacattagtttaaaccaatgcttagagctttctaattattttatgctttaaaagatactgtgttatctacgatgaccttaccgtctttaataactttttctgcgtgattgataccaaaatgatatggaatatattcatgatttggtgcatcccaaattactaaattagccttatcacctgtgttaattgtacccgcgttaatgtctattgctttagcagcattgaccgtaacagcattccaaacttcattaggtgatagctttaatttcaaggctgcaatcgccataacaagttgtaagttgtttgtgacactactaccagggttataatcagttgctaatgcaatcgcaccgttattgtcaagcatgcctcttgcatctgcataatcttctttacctaaatagaacgtcgttgcaggtaagaggacagctacagtatcactatttcgcaacttttcttttcctttatcactagaagctactaagtggtctgctgatattgcttgttcatcaattgctaattccagtccgcctaacggatcaatttcatccgcatgtattttcactttaaaacctgcttctttggctttttgcatataatgttgcgattgttctattgtaaatacatctgtttcacagaaaatatccgcaaagtctgcatattgttttacttccggaagtaacgcaatcatttcttctaaaaatgcctcatttgaacttgcctctttaggtacagcatgaggccctaggaaagtatgtttcatgtctaaatcatatttctcagctaaacgattagacactttcaattgcttcagttcattttctctatctaatccataaccactcttactttcaactgcaagcacgccgtgtttaatcatagtaagcaaatcatgctctgcttttttaaacaagtcatcttcggatgtttctctagtagcattaacggtagataatatgccaccacccatttctaatatttcaaggtaagacttaccttgacgttttaatgacatctcatgttctcgagatccaccaaatgttaaatgggtatgtgcatctactaatgctggggacactaccttcccactagcatcaatcgtctcagtcgcatcgtagtcatctgtatgtgttccagcatatacaattttgccatctttaatgacaactgtaccatttttcacaacatttaattcatctaattccttacccttcaaaggtttatctgttgatctcggtaaaattaattctgctatatgattaattattaaatcattcattacttatcacctgctttatcaatcattggaatatgaatacctttttctttagctgtttgaatagcgatgtcatagccagcatcaacatgtcgggcaacacccatacctgggtcagtcgtcaatacacgttccaatcttctttcagcacgctctgatccatctgctacaacaaccatacccgcatgaagtgaatatcccatgccaacaccgccaccgtgatggaatgaaatccatgaaccacctgcagctgtgttaatgagtgcattcaatacagcccaatcaccaaccgcgtcactaccatctttcatactttctgtttcacggttaggactagcaactgaaccagcatctaaatggtctcgtccaataacaattggtgctgaaatttcaccgtcacgtacaagacgatttaaagctaagcccattttcgctctttctccatagcctaaccaagcaatacgtgatggtagtccttgatatgaaattttttcttcagctaaatcaagccatcttaataacttttcattttctgggaaaagtttgcgcatttcttcatccgcacgctcgatatcttttggatcaccactcaacgcagcaaagcggaatggccctttaccttcacagaataatggtctaatgtaagctggtacaaagcctgggaagtcaaaagcatttttcactccgttattgaaggctacttgacgaatattgttaccataatcaaatgctacagcgccacgtttttggaattcaagcattaattcaacatgctttgccattgaagcttgtgacagttcaacatattttttcggatctttttcacgcaatactttcgcttcttctacagagtatccttgtggcacatatccatttagcggatcatgtgcacttgtttggtcagtaataatgtcaattttaaatcctttttctagaatcgcttgatggatgtctacagcatttccaactaacccgattgataatccttctccacgttctttcgcctcttctgctaattttaatgcttcatctaaatcagctgttttaacatcacagtatttcgtatcaattcgcttatcaacacgtgtttcatcaacatccacgcaaattgctaccccatgattcatagtaattgctaacggttgcgcaccacccataccacctaaacctgctgtcagtgtaacagtgcctgctaaatctccattaaagtgttgattacctagctcggcaaatgtctcataagtaccttgcacaataccttgagaaccaatatatatccaactaccggctgtcatctgtccatacatgattaaaccttttttatctaattcattaaaatgatcccagtttgcccattcaggcactaatactgaatttgaaattaatacacgtggcgcttcttcatgtgttttaaatacagcaactggctttcctgattgtactaacattgtctcatctgattctaattctcgtaacgttttctctattgcttcaaaagcttcccaattacgtgctgcttttccaataccaccataaacaactaaatcttctggtctttcagcaacttctgggtctaaattgttgtataacattctaagtactgcttcttgttcccaacctttacactcaatactcaaacctttttttgcttgaatttttctcataaaattcgctcctgttcttttaagaagttaattccactaaatttaaaacgcttacattattatcttcaatattcattatagtatgttaaaatatagccaacaaatataaataaactaattatccatagcttgaatctataaataaaaggagcaaaacacatgaaaattattcagttagaatacttcttggctatcgtgaaatataatagttttactaaagctgcacaatttttacatattagccagccatctttaactgctacgattaaaaaaatggaagcagatttaggttatgacttatttacacgttcaacaaaagacatcaagattaccgaaaaaggaatacagttttatcgttatgcgagcgaattagttcaacaatatcgatccacgatggaaaaaatgtatgatttaagcgttacatcagaaccaaggataaaaattgggactcttgaatctacgaatcaatggattgcgaatttaattcgaaagcaccattccgactaccctgaacagcaatatcgtttatatgaaatacatgataaacatcaatctatagagcaattactgaattttaatattcatttagctataacaaatgaaaaaataacccacgaagatataagatccattcctttatatgaggaatcttacattttattagcacccaaggaaacatttaaaaatcaaaattgggtagatgttgaaaatttgccactcatattaccaaacaaaaattctcaagtgcgcaaacacttagatgactattttaatagaagaaatattcgtccaaatgtcgttgtagaaacagatcgattcgaatcagcagttggatttgttcatctcggcttaggttacgctatcattccgagattttattaccaatcatttcacacgtctaatttagaatataaaaaaattcgtccaaacttaggccgaaaaatttatatcaattaccataaaaaacgcaaacactccgaacaagtacatacattcgtacaacaatgccaagattatttatatggacttttaggggctgacccattagtcccttttgaaccaaaaaatcgaaggcacccgtgaaagatgtcttcgatttttgttttttttggatgaaatatagaggattttccccctatatttggttttgtatgattgtttttccctcatatttccttactctagttactaatttcctaaaattgtgcgcaagaaatacaagtcccatttccttaaaaattttttcagctcctcggacatggaatcttttaaatttcatattttgtttaatgtttccaaaaactgtttcgacatctatctttcgctgcgcatagtatgaggctgtttctttgctttctatcttttcattcgcttttatttttatatattcccaggttggattaatattcaaacgtcgattttttccttcttttgctttggtacatttctctctcaatggacatcctgtacaatcttcacattcatagattttgaagtttcgaataaatccatttctatctttacgttgtgaataatgtgagaacactactcttttctgattgggacaaatatagtaatcatccaactcgttgtaagtccaattatctcgatgaaactgattttgtttatgggcgcgtttcttctcttttaagtaaccttgatgcggaatgatgggggtggattctgtttcgtctaacacataacaataattttcttcacttgcataaccggcatctgcgacaatattttctggtaaacctatttttgattcaatcttttcaagaaatgggataaatgttcgtgtatctgttggatttggataacaatcataagcaagagcaaattgattttctgtcgcaagttgaatattataacctggttttagttggccattaagcatgtgatcttctttcattcgcataaaagtagcgtcatgatccgtctttgagaaactattgcgtacacccataatcactaattgttcttcgtagctcatttttctttgggcaaaatcatcgaatcgcttcttctgcttatgaacttcagatttttctttacgaagtaattttcgttcttctactgtttcggtttggtcaatcgcttcaattaattgattttccttttcttccaaagattgacgaatcctttcaatctcttctatagaaagttcatcctttaaatcatctattaactcaggtaagatttttgtttccaccatttgttggtagttttcaagggctttttgatcaaggctatccttatactttaaaatactttttttccaaacgaaagagtatttattcgcatccgcttcaatttttgtaccatcaatgtatagagcactgccactgattaagccactttgaaccagtagctcacgaaattgaacaaatgaatgatctagaatatcgttcataatcggatgaacgcgaaaacgattaatagtacgaaagttagggaattgctcttgagataagtagcgcatccgaatactatctatcagcatattttgtatttggcggcccgaataaaccccttgaatataggcacaaagaataatggaaagtagcatacgaggatgatattggggtctacccatagattgataataaggaagaaagacttcatcgggaatagagtcaacaaactgcacaatggcatgagcaaaatcattttcttctaatttaatttcaagatctataggcaaacaaagttggtttatggtataattttgatacatgataaagcacctctctcaaatggattaatcacctatattatagcagagtgtgctttatttttgtattcactttcaaaagataaatagaggagctacttttgggtcagcccccttatgcagttgctcagtcaactgtataccttttgcctttaacttaagttattagagcctcttatgcagttgcgcagatcatcgtataaaaattaatgacgtcatttcaaaaatcgatacaaaaataatttattataaaaattctaagaaagaagtgaagcagatgttaaaatctattaatcatatatgcttttcagtcagaaatttaaacgattcaatacatttttatagagatattttacttgggaaattgctattgactggtaaaaaaactgcttattttgagcttgcaggcctatggattgctttaaatgaagaaaaagatataccacgtaatgaaattcacttttcatatacacatatagctttcactatagatgacagcgaatttaaatattggcatcagaggttaaaagataataacgtgaatattttagaaggaagagttagagatattagagatagacaatcaatttactttaccgaccctgatggtcataagctagaattacatactggcacacttgagaacagattaaattattataaagaggctaaaccacatatgacattttacaaataaggtgtcattataaaaaggcctcttgaactccgttaaaattttaattaattattatataataagagaacttttcaaacaatacagttgttatttttgctatttcaacaaacataaataagcagtaagatgactacaacttaagagtcttcttactgcaattatttttcaaatatatcaacgttaatataacttctattaagaaatactcacattctgccctgcaatgcaaatctcgtcacatataaatatttttaattatttaaaaaaatgatgcactaaattagcaacgagcttagcagttctattgtcagcgtcatatgttggattcatctcagcaatactaactgaagacaccttatcacttggaataatacgttttgctaattcaagaacagtatgtggatacaaacctaacactgccggcgcacttaccccaggcgcaaacgcactatcaatgacatccatacaaatcgtaaacataatgacatcatgttcatgtacaaaacgttcaatcatatctttaattgttggtgatacgtgactcaataattcatctgcaaagacataatcaatctttttctctttagcataatcaaataaactttgcgtattaccaccttgagcaataccaagcactaaataatctgtgttttcatcttcttctaaaatttgtctaaagctcgttccagatgtagattgttgttcagcacgtgtatcaaaatgcgcatcaatatttatcacaccaatagattgtgttggatagactttacgtgttgctaaatattgagcatacgcaatatcatgtccaccacctaataaaaatgtttgtctatgattagcaattgacttcgctgcaagcatagcaaattctttttgagtatcaattaattcctcatgatcatgataaacatttccgtaatcgactaaagtttcacattgattcaaatccggcaaacctgcaaatgcttgtttaatcgcatctggtccttcttttgcaccaatgcgccccttgtttaaagcaacacctttgtcaacagcatagcctaatataccgacccctgatggcatactactcttttccagcttagacaaatcttcaaatgttactgtttgaaaatgtctaaattttttcgggtctgtttcactatctaaccttccagtccataaatttggttcaccttgcttgtacacagcatttccccctcttatttatgtggcttattaacaattaaagtataacgtataggaaattttgaattcaattcatagttaaatccgtatcttaaaaatacttatctacattacttttacccctattttctatgtaataacgaatacttagctgatttatgttaataaaatacgtcaagactattacattttcattaatattgacatagacaatttatctctcggcttgtaatatgtataattgttactaaaagatattttgcttgttacctaatggaggttacatataatgaagaacaataaaatttctggttttcaatgggcaatgacgattttcgtcttctttgtcattacaatggcgttatccattatgctcagagatttccagtctataattggtgtcaaacactttatatttgaagttacagatctagcaccattaattgctgcaatcatttgtatactcgttttcaaatataaaaaggtccaacttgcaggtttaaaattctcaatcagcctgaaagtaattgaacgtctattgctagctttaattttacctttaattattctaattattggtatgtacagctttaatacatttgcagatagctttattttattacaatcaacaggcttatcagtacctattacacacattctgattggacatattctgatggcgttcgtagtagaattcggattccgttcatacttacaaaatattgttgaaacgaaaatgaacacgttctttgcaagtattgttgttggtttgatgtattcagttttctcagcaaatacaacttatggtacagaatttgctgcttataacttcctttatacattctcattctctatgattcttggtgaattaattagagcgactaaaggacgtacaatttatattgcaacgacattccatgcttcaatgacattcggacttattttcttgtttagcgaagaaatcggcgatctattttcaatcaaagtcatcgccatttcaacagcaatcgttgcagtaggatacattggtttaagcttaattatccgaggtattgcatatttaacaacaagacgaaaccttgaagaacttgagcctaataattatttagaccatgtcaatgacgatgaagaaactaatcatactgaggctgaaaaatcttcttcaaatattaaagatgctgaaaaaacaggtgtagctactgcatcaacggttggtgttgctaaaaatgatactgaaaatacagtggctgacgaaccaagcattcatgaaggtactgaaaaaacagaacctcaacatcacataggtaatcaaactgaatctaatcatgatgaagatcatgacatcacttcggagtcagtagaatcagcagaatcagttaaacaagcaccacaaagtgacgatttaacaaacgattcaaatgaagatgaaatagagcaatcattaaaagaacctgcgacttataaagaagacagacgttcatcagttgtaattgatgcagaaaaacatatcgaaaaaactgaagaacaatcttcagataaaaacaaataataacaaagcgcttgctagtacctcttaaaaagatgatgctagcaagcgcttttctatactatatattatttttctaaaattttaacaccctcttgagtgcctacaataacttgatctgccatatctaagaagtatcctgtctcaaacacacctgtcagatgaattaaatactcatggaacttatatgggtcaattccttttggtaacttacaatctaaaatataattgccattatcagttataaatgcgacatcttcgtttacacgacgttctacttttatatcagcgtatgattcaattttacgtaatatgtgataccagttaaatttatccacctctactggtaacttaaacgtctcacctaagtattgaactattttcgtttcatcgacaaccacaacaaaacgcgatgccatttcatctataactttctctctgaacagcgcaccaccgccacctttaattatatttaaagatggatctacttcatcagcaccatcaattgctaagtcgatatgatcaacatcattgatttcacatattttaatacctaattcttttgctaaaaatgcaattttattagaagtgcatacacctgtaatattgtaaccacgttctttaattagttgcgccatttgaggtaagagtaattccattgtacttcctgtaccaattcccagcgtcatgtcaccattgatttgacttaaaacatcatttaatgtcattaacttgagtgctttgacatctttcatgaaggtagcctcccatatttatgtaatctattcaattcatattttacatgactcgtataaattaacatacccttatttctaacatttttttaaacatatcaatcagaatttacaattctaaaaatgttttatagtacaatatattttaaataatactcgttaaggagaatgatatgatatcaattcacgcaatttcgacaggaaaaatccaagatttgccttatagctcgaaaagaccgatgcgctatgctttagataaaactaagatttcacaaacaacatggttatcttcaactggtttcactggtgatgaacaggcttataaagatcatggtggaccacataaagcagtttgtgggtttagtaagcataattatgcactgtatcaagatgatttacctacactacctactcatgcgatgtttggagagaatttaacatttgattatttagacgaatctgatgtttactttggtaatcaatatcgtttaggtgaagcgttaattgaggtttctgaaattagagaaccatgctggaaaattcaagcaaaatataatattcctgatttagtgaagcgcatgtctacatctggtaaaacaggtttctatttccgggtattaaaacaaggctatgtatctccaaatgatcagctttacttaatacaagaagcaccaatcgaacatcgtttatctgtacaacagcttaatgacctttattataatgatagacaaaatcaagatatgttacgatatgcactaaacaatccatttctgtcaccaacaagacgcgataaacttcaaaaaatgtataacagaacattgaaataattacctttcattataagtgttaaatgaacttttcaaaacaaaaaggaatcaacttacacatcgtttgtataatagtcttatctataaccactgatgctattgattccttttttatgttatatattttctttatttcaaactgtatattaatgatgtcacttcatttgatacgattcttgataacctattcaaaattccgccaaataacataaatattatataaatgccgatacttttaatcattttctactttttcttcgatacggaaacttgttttcgaattgaacacttcaccagcttttaaaattgacggtgctttttcaccatataaattaatatcatttggtaaaaattgtgtttctaatgtaaagccagaatgtggtttataaatattaaatggactatcccactcatcaggctggttaaaagtaaagaacacaacatgaggcatatctgtatcgacctctaacataaattcatgattttcaacatacattttatgttcaccaactgtaaatgggtgatcgagaccaccaaaacgtgtcatttgttggcttaattgcgcatgttgtgatgtaaaaatatcactcaattttatcttgttatcttcaaacacttcatgtaaatctagaatatcacctgtaacaatatttcgctcatctaatacatacatatctaattgattacttgaaatgcgatgattatcaacgacattattatctcgattcaaattgaagtacacatgattcgtaggactaaacaatgtgtcttctgatgcaactgcttcgtattcaatcgaccattggtgatccgcatcataaatatgtgtaatcgtcacatcgatatcacccgggaaatgatcatcagctgatttcaacaccgtcttaaatataactttaatttgagcaatttcatttctaatttcataatcaaataacttattgtccaaaccatgacatccaccatgtaaatgatgttcaccgttgtttttttctaactgatattctttacctttcaacttaaatttagcattatcaattctaccgctatatcttcctatagaagcaccaaatttaaaaggattactatgataaaattcatccgcttcaacaacatttccaagaacaatattattatcatgatatttccaagacactactcttgctccataattcgtaaaaataattttagtttcatcattatcaattttgattaaatctacaccttgtctttggtgctcaacttcaactatcatttttacttctcccttctaaccacaagtgttcaagctctgctgggtagcaacattactaaaacacctacaatacaaatgattgcaccgataacatcatatttatctggcatttgtttatctacgaccatcgcaaaaatcaaactcatgatgataaatacgccaccatatgctgcatatactcttccgaatgatggaaatgattgaaatgtcgcaatgacaccatataacatgagtatcgcaccgcctattagcccaacaagtgaagactgtccttccctaagccacagccaaatcaggtatcccccacctatttcacataagccagctaatataaatataaaaatcggatataacatgaaatcactccatcacacatttgctatcaataatctatcggctacatatcatttgtttacatttcttcttacttcacattcccattttaaaaagttcgttttcacattcatattgtacacttttttagacattattctatagctaaatataaaaaaataagagtaacacgctttcatcatcattttatatgataaatgtgtgtcactctcatcaattttattttttaaatacacgtttcattgaattaaataagccacgttcaaatgtaagtactgaatctttatatgttttaattgcaatccatatcaagacagctaccattacaattgagattaaagaacttaagatgacctcatatatttgaagccctgaagtttgagcgcgtacaactaattgaaatggcgctaaaaacggaatataacttgtgattaaagcaagttgtccatcaggattatttatcgtgaatatcgcgatataaaatgcaatcataccaagtaatgtcagtggcatcaaagattgatttaaatcttctattctagatgttaatgatccgaggatggctgcaagtaatacatacgccgtaattccaacaatactacttataattccgacaataataatttgccaagacaattgattcatttccacgttaaaaccttgtagcaagtcttttaagtcaaaggcaaaaatgcatataactgccatcaatacaattaaaataatctgagtcacggcaactgctataacgcctaaaattttagcaaaaatatgttggattggtgaaatacttgtaataatcatttcaatgacacgcgatgttttctcactagcaatttccatagctatttgagatgcataatttaaaacaatgaagaacattagaaagataatgccataagctaaagcatagttgaaaatcttttgtccttctgatactttatcgacttcatcattagaaatcaccttattatcaactttactttgtgcttgtaatttttgtaagtcttctttgttgatatttaattccccggctaccatatttgtttgaatagctgtaagcagtgcttgtactttttgtgaatcttcatgacttactcgcttctcactaatgattgtcccttgtaacgtgcgattttgattcaccttgataatataagctttatcaagtttatgtttttttacttctttttcagcatcttctatagaaactttagtaaacttagcatcactatgaaatgtattcgcctgttgcttgaaaaccttatagatttgttcattcggtgctgctacaccaattttatctggaccatcatcaaacatgttaataatcttatcaatgttagataggccaatcattaaggcagcaataataatcataaaaattacaaatgatttagctttaatttttttgatatatgtcaaagtaaatgtcgcccaaaacttatgcatccttgccaccaaccttctcaatgaatatatcttgtaatgatggttctacaacttggaatcgtttaacataaccttgatgtgccacaacttgataaatatctttggctacgtcttcattctcaatcgtcaactgaagaccttgcttcatgttttcactatgaatgatgcctctaatgtttgttaaatctggtagtgttgtttctgattcaatgacaactttcttgttaccattagatgcacgtacatgattgatatcaccagaaacaacaagttgacctttatctaaaatacaaacatcatcacataattcttcaacatgctccatacggtgagaactataaacgattgtactgccccaatcatttaagtctttaactgcttcttttaataactcaacattaactgggtctagaccactgaaaggctcatctaatattagtaattctggtttatgtaacatacttgctaacagctgaattttttgttgattcccttttgatagactatcaattcgttttttgcggttttcagtaatatcaaaacgctcaagccaatacgatatttgctgttgtatttctgtttttgacattccctttaaagttgccaaatatttcaattcttcttcaactgtcaatttcccatgtaaaccgcgttcttccggtaaataaccaatacgattgtacattgttttatctagttttttaccgttatacgtaatgtgtccttcagttggttcacttaagcctaaaatcatacgaaatgtcgttgttttacctgcaccatttcttcctagaaaacctaacattttacctgattctaactttaatgaaatatcatttactgccgtcatcttgccaaaacgtttcgtaacatgttcaattacaagtcccatactttgcctcctaaaaaaatatgtatttatcttaatataacatttccattctctataaatgcaatatttttaaaatgaatttatttttaaaatttctgaaattgaaaaatttaaatagtgccatttttgcatgttaagtatcattagcactagatatgttttttccatgcctttattgccttatttgtaaaaaaatatcccagcatcattgtgccgagatatttatatcattacaattgattatctgtttcttccggtgttttcggtgtttcagatgtacacgctttttccggtgtttcagatgtcactggttgatttttaattgtagacgggtattttgggctttcgccatatttatttgccggcttactgtcaaagcataggaatactatcataacaattgttaggcctaaataaacaaaataaagaagtactaacaaaatattaagacccatcggcattaatgtaaaatcactgtcataataactatcgataatctgtaatactatataaaatataatactgaatactgtcataatcattggaaataacattgttcttgatatatcgtgaaatcttcgaacgcacaacgctaaatttggaataaacgttgccaaactatagacaaaagtatacacagatgtaaggataatcatcaatatactcataactattaatgtttcgttatccgccgctatagaaataaagaatagaaataggtttattattagcacacacacagctggaaccataagtatcaaatgccatagtgccatataccaatattcactacgtcttgatctccccttaaaatttacataatttttccaaaataaaacgaatgatttcataaaacctacttgaggtaattgttccattgtaatctccctttcgttaatcatatttatatttttaattattgttaccgttataatttacaagattcattatcaagccacttcatttcaatcgtcaatcactttggaaaatgaactttatatttcatcactagtaaaatgaaaacccgctacaagtacacatctatatgaagactcatttgaaagtcaacgcttcgttaactatactaaaaatatgtcatactgcaatgttcacgtttaaaagagtctcaatctatgcaaataaaatattccataacaaagtatatactttacatttttataattcttaacaatactattttatcaaacatttaccacaataaaaatatctttttcatttttatttaaattaatcatataattgcgaggagaatattatggatttcgttaataatgatacaagacaaattgctaaaaacttattaggtgtcaaagtgatttatcaggataccactcaaacgtatacaggctacatcgtggaaacggaagcttacttaggtttgaatgatcgtgcggctcatggctatggcggtaaaataacacctaaagtcacgtcattatataaacgtggtggtacaatttatgcacatgtcatgcatacgcatttactcattaattttgtaacaaaatctgaaggtatacctgaaggcgtacttatccgcgcaattgaaccagaagaaggtttatccgctatgttccgtaacagaggtaagaaaggctacgaggtaacgaatggcccaggaaaatggactaaggcatttaacattccacgggctatcgatggcgctacgttaaatgactgtagattgtctattgatactaagaatcgtaaatatcctaaagatattattgctagtccacgaatcggtattccaaataaaggtgattggacacataaatctttacgttacacagtgaaaggtaatccatttgtgtctcgcatgcgtaaatcagattgtatgtttcccgaagatacttggaaataaatgccatctttcattgattactatcatgaaaatgaaatctatctccttataagtcaatcaatcgtgccgtcaacatgcggatgggttgattgtttttctttgtatccatcatattttttgattcatctcctcttattgaacttgttcttaattataaaatataacaatagaattatttataattattaaatttagacgcattaatattattgatattattttcaaaaactagaaatattgatttgttgcatgtataatgttaaaagcgcccttttataacgcttacatataaaagcttatttagggagagggatattcaacaagggggatttgaaaatgatagaacttaatgcaattacaacattatgtttagcttgtatcctttatttacttggtaaggctatcgttaatcacgttaattttttaaaacgtatttgtataccagcaccagtgattggcggcttaatctttgctattttagttgcggctttggattcatttggcatggttaagattaaattagatgcttcattcattcaagatttcttcatgttagcattctttacgacaatcggtcttggtgcatcattgaaattatttaaattaggtggcaaagtcttgctattatactttatgttttgtgctatcatttcagtcattcaaaacatagttggtgtatcactagcaaaagtattaaatattaaacctttgttaggattaacagcaggttccatgtctatggaaggcggtcatggtaatgctgctgcttatggtaagacaattcaagatttaggtattgattcggcactgacagcggctcttgcagctgcaactttaggtcttgtatttggagggcttatcggtggtccagttgtaaaatttttaatcaaacgttataacttaaagcctcaacatagtgacgatacatttaaagattatagccaagtagcatataacgaacatttacatagtaaatttaatgccactgaagtattcttcattcaatttacaatcgttgtattctgtatggcagttggaagttatttcagtcatttgtttacagctcaaacagggattaatgttccaatttacgttggctcattatttgtagctgttattgtccgaaatatctctgaaagttttaattttaatattgtagatttaaaaattactaatcaaattggcgatgtcgcattaggtattttcttatctcttgcgctaatgagcattcaattaatcgaaatttataaacttgctatacctcttattattatcgttttagttcaagttgtcgttatgattttatttgctgttttaattttatttagaggtttaggaaaagattatgatgctgcagtaatggtaggtggttttatcggtcatgggcttggtgcaacgccaaatgccatggcaaatttagatgttattactaaaaaatatggaaactcacctaaagcatatttagttgtacctattgttggtgcattcttaatcgatttaattggtgttatagtcattattggattcatacaatggtttagttaaacaccaaactcataaataaaagaggaggccttcgcctcctcttttatttatcctcgatgtatattcaagttacgttgttctatccatgacaatatttccggactaaatacgatttgtttttgtgttaagtcgtcaatatttttagcatctaacatcgtcattattgatttcatgtgttcaataaatgattctacataagctactgtatgtgcaatgccattattttcaacttgatttaaaaacggacgtgacataccagttgcctttgcaccaagtgctaaacttttaattgcatcgagtggtgtacgtaaaccaccactcgcgaaaactgaaatttcgctttgataagccgttgtttcaagtaatgactcaactgtagactgtccccatgatgataagtaatccatatctttatttgcacgacgttcattttcaatatctacaaagttagtaccacctttgccactaacatcgacatacttgacgcctatttgttgtaagtcatgcattaattctttgctcataccaaatccaacttcttttataatgactggaacagacactcgtgatacaatcgacgctatattatctaaccaagtcacaaattcacgattcccttcaggcataactaattcttgaggagaattaacatggatttgtaacgcttgtgcctcaagtaattcaactgcttccaaagccttttctactggtacgtccgcaccaacattgctaaaaatcatgccttcaggattcatttttcgcgcaatcgtaaacgtctcagccatgcgtggatttctcaatgccgcatgtgttgatccaactgccatcgctaagccagtttctcttgcaactacagctagcttttcattgatgtttttcgtccactcgctaccacccgtcattgcattaatataaaccggatatgccatcgttaagtcaggcgtctgtgatgtcaaatcgatatcatttacattaattgatgggatagaatgatgcacaaaacgcatcttatcaaaatctgaatgcattgcgtcagattgggccattgctatttcaacatgttcattttttctctgttctctttgaaaatcactcatgattaaacctaccttttcgtcatttctaatttaaaaccattttttacgtctgaaaaagatgattaatacgacagctataacaaacattacagctaagcaaatataatatccataatgtaaatgtaatgccggcatatttacaaagttcataccataaatcccagctatgaatgttaacggtgaaaatataactgatactaatgtcagtacttgcataatactattcattctaaatgacgtgtatgactcaaaattttctcgtatttcgtttgtcatttcttgagcagtacgaatgatattacgttgcttaatcaagtggtcatcgatatgttgaatgtatagcgaatgtttattatctataatcaaatcaccattttgtttcattgtatcaattagctcttgcataggaaacagtacacgttttactttaatcaaatccgaacgtaacttaaagacactatccatgaccattttattaaagcgatcatctacatggcggtcttcaaaatgataaacactatcttcaagtgcatatacaaagttgaaatatttatcaaccatcatatctaaaattaatatgacgacatctgcacaatctaattctgcatctaatgtattcatatacttatagactactttatttaatgattccaacgtttgatgatgatatgttactaatacattgtcttgtataaaaatatttagtgctattggtgaatagtttgaccccataatactatggaatactaagtattgataatctttataagatttatatttagctcgtggcataccgttaattgcatcatccacttctaaatcattaaaattaaaatgtgctttaaaccattcattttcttgttcattcggttcatcaaaatcataccaaacaatagtcgcatcttttggtatctctttgatatcatcaactactttaaacggttcatatgtagtttgataccgtatctttaaagccatcgatactccccctaaataacgaattctctattattttatcatgaattaaataacgtgtatgtcttaatttattttagtatgatagtcactaaggagatggttattatcaaacaactttttacacatactcaaaccgtaacatctgaattcattgaccataacaatcatatgcatgatgcaaattataatatcatttttagtgacgtcgtgaatcgttttaattacagccacggtctttctttaaaagaacgcgaaaatttagcatatacgctatttacactagaagaacatacgacatacctctcagaattgtctcttggcgatgtatttactgttactttatatatttatgattacgattataagcggttgcatttatttttaacattaactaaagaagatggtacactagcatcaacaaatgaagtaatgatgatgggaattaatcagcacacacgtcgttctgatgcttttcctgaatcattttcaacacaaatagcacactattataaaaatcaatcaactatcacttggcctgaacaattaggacataaaatagcaattccacacaaaggagcattaaaatgacagatgcattacaacaaaagattcatatcgaattactagatttattagatgatgttaagtttgaattaacagaattaaatgcacaaaaagggttatacattaacggaccagcaaatcagctacttaagcgtggcgtgcatatggcttatgttcaaggacaaaagcaagccatcgataatattatgactattgtggaacaacagcttgaagatcaacatttcctagaacattatgataaatttcaaaatgaggttgctcatcgcaattatgataaaacagctaactttgcagaacttagtgatattccacgtcaattcgataattttttagatcaattttatcaaattaaagggcaatactttatcatcacacatatcaatacacttattggtgattttcactcagaagctcattaacaattagtctatataacccttgctatattttcaaaaacaaaacccaattacgttttcatgtcaaatatcatcttgcatgaaatcgtaactgggtcatttatatgttattagttattttgtgttacatcctcatctatcgatttggcaatttgtttaatagctttatgtgattgtctaattggataaattggaaaatcatgtaccatcttaggataatcataaaactcaatgtattgatgatgttgcaacatcatttgttcaaatagcttcatatcaggatgtgtcatttcacgtccaccaccaaacatataaactggtggcaatccttctattgtgccattaattggcgatatgcgcttatctgttaatggtaggccattcgcccattttttcataatctcattgacaccaaactgacttagaaccgcatcttgttcgattaaggcgtccgaaatatctttattagatagtgttgcatctaaaattggtgagattaaatacaatttattcggtaatggctgttgattatctaaaagagattgtacaaaggataatgccagtgcaccacctgaaccatcacccatgactacgacattttgatgtcctacttcagatactaattgatcataaacacgttgtatcgcttggaaagtatcgtcaatatgaaactctggtgtctttggatagataggcagtacaacctcatataatgtacttaaagtgattttatccaacaatctccaatggaacggtgatggttgtagtgcattgaatccaccgtgaatatataaaattttcttatcaatttgatgtctgaaattaaagcgaaagacttgcatatcatctaatgacaatttttctaaatttgctttaacatttaatgttgaaggctgcttatgtttttttctattttcaatttctcttttataaaaaaatctttcaacatcttgatcatttttaaacataatcgagcgattgtgaagcaaatatttattgacaacgctattcataacacggtttctaatcaatgtcttaacctacctttatatattttatgtatccaatgattgtctatcccctacattctttgccaaaaaaagtatataatgtagaagatattttctttttcactttcaaatttaagactacaattgaacagtgatttttcatcattataacagacaactagacatattgataagtaaagaaaagaactttatacggaggtaccttgcatgacaaatccaaatcaacgattagaaccatttgatgagacatttcaacaaccgaatattcatcgtggtaagcgatatggtaagaaaaaacgttcattggtaagcatgattattcaaatcattgttgttatattaaccgcaatcgctggatacagcatgtggaaacaacccatttttaatattgtcttcaccaaagaatctgtagattttgatggcattaaaaattttaacgagacaattggaaaaatgcatcaattaaatattaatttgggtaatatcaatgatttacaacaaggaatcgatcgcttaattttagtctttaacggtttctttattttatgtatcgttagcctagtcataacaatactgacaattgtatttaatcgcacagttctaaaagtagtaaatattttagtgttaacaattatgttagtcattacattgtatttcagttatattattaaagcactcgcacaagaaattgcagatgttttcaaaaaatattatttaaatgtaccaccagatcaagtgattacagaagctgacgctattcataacggcatcattttacttggctgtagcatcggtttacttgttataagcttattcttccgtaatcgcatgcctcgtttaaaataatgttatatagtagggattgggacagaaatgttattttcacaaaattcatttcgttgacccacttcctgctttttctttattaatgacctactacgtcaatgccaaattttaatataattcctctaacattctataaatcaacaaataaaaaaagtatcgataaccatatttggcaccgatactttaaaaatcatgtccccacaacataatttttgattagtcacacttcaattaatttattttatttattcatgattgatactattatctgcatctaacttttgagctgtagcttttgcttttttattactttgtaaaaataaacataaaattaaggcgatgatgctaaatatcgttgcaactataaatgcatcattaataccttcaaccgttgctagtttatttacaaattgtagtaacactttcattgcgccttcttgtccgccatattgtgatgctaattcacgcatatgatcttgtacaacaggattcgttttatctaactcttccccaaaagctgataagtgttgtgtagtttgtgttgtcattacagtaactaagattgctgtacctatagagcctgctaattgacgcatcgtatttaagaaagcattaccatgagaggcaagtcgtcccggtaacgcattaatagctgcagttaccattggcatcattataaatgccataccaaatgaacgaagtacatagatacccatgattgtcatatatggtgtatccatatttaatttagttaattcccatgttgcataagtcattacagcaataccaaagatagctaatggttttaaaccaatagtatctaacaatttacctgcaaatggtcctagtagacccataattagagaaccaggtaataataacaatccggaatctaatgctgagaatccgcgtaaattttgtaaataaatcggtaataaaatcataccaccatataaacttaacattacaaccatattaataattgttgttaatgtaaatgttgggaatttcaatacttctaaattcaacattggtgatttcattcttaattctctaataacgaatagaataataaagataataccaatcgcaaacattgtttctatctctactgaaccccaacctttgttgccagcttctgagaaaccatataacaaagcaccaaaaccaatcgtactaaaaatgatacctgggatatcagctttagggtttgttgtatattgatataacttaaaccatacaaaaccaattaaaatagcgataatcccgataatgaacataccgtaaaacatcacattccaatggtaattttgtacaatataacctgataatgttggaccaattgcaggtgctaaaatcattgcgatacccattgtacccatggcagcaccacgtttttcaggtggataaattgtaataataacaattgaacctaatggcattagtacacctgcaccaatggcttgtaatacacgtccaaccatcatgattgggaaattcattgaaatcgcacagattaatgaaccaattgtaaagagtactaacgcaactaaaaataattttcgatatgaatatttattaaatagatacgccgtaattggtattaaaataccgtttactaacatgaatcccgtcatcaaccattgccctgttgacgcagaaatattaaattccgtattaatttttggtaaagcaacatttaataatgtttggtttaaaatcgcaataaacataccgaataataatgccgctaatattttaccgcgtgaaacaccttcaccaaaaataaagtttttatgttctttttttattttttcattcactttatattcttctgattcaggatttttagcagcaactgcttcctcatccttattattagtgaatgcttcttgatctttctcagacccctttgtgtaaccatttagactaacttggctatgatcatcttgattgtcaacacgcaactcttcatgcgtcatacgttgtgtcgattgatcagttgttttgtctaaatcactagctttaaatttagattgatttgattgacgtgtcgtaaattgttgttccttttgttggcgtttgcctttttttcttgatcttattaaaaataaattgataaccccaacaataatgagcgctaaaataatgtagctaataatgaaggtcgtagtcatttaatgacccccttaatttttatggatttttacttcagcgttcattccaggaacaacttgtttagacggttctgattctagagtgattttaacaggtattacttgagaaactttagtgtagttaccatcactatttgatgatggcattaatgaaaagcttgcagcagttgcttttccaatactatcaactttacctttaatagaagctttttgaccgtcaatagtcacatcaacatctttacctacttcaacatctttaatatctttttcgtcaatatttgctgttacatataaatcatctaaattgtatgcataagcgattgggttaccagcttgcaccattgaaccttccataccatctaatttggcaattgtacctttttgaggcattttaagatccatatctttcgtttcgccatcttgaccttgtacagtaacaattgctactttgtcacctttatcgagtttgtcaccttgtttaacattaagtgatttaatttgtccagatgcaggacttgctattttaatttgatcgccatttacttttgcattatcagttgttacatagcttgttgttttattccaaaaataaaagccagcaatcccaattgctaacagtacaacaaccgtaatgacattaattaatatcatctttttcatgaaacatttcctcctatttgcttttaaaattcactttatttattatagagacatgataactaaaaaaacaccaacaatttttataagagtgttggttaaaattcacaaaggtgtaacaatatgaaacgacaagccaaaatagaaattcaaaacgcacttgttgatttgatggctgaatatccttttcaagaaatatccactaaaatgatttgcgcgtattgtaatattaatcgttctactttttatgattattacaaagataaatttgatttattggataccatcaactcaaagcataaggaaaaattccaatttcttctaagcgcgctacatcataatttcgaaaatattaaacaggataagcttaaactttataaattcttcattattattgctaagtatatcaagcacaatgagcagtttttcaaagacattttagttacctatccaatgaaaacattattcatagactatataaatttagcgagagattactatcaacaaattatgaatgactatagtactacagtaaccaataaacagctttatgttacatatatcataggcggtcaagctggggtgtttattaattggctttcgaatggttgtaatgaatcacctgaagaagttgctgacattttattggctaatacgattaaacttcaaaactaataatacggtttcattctaataaagaaatgctataaaacaactagataaagttaaaccaaatggatagataatagtacatatgtaacggtgctatcaatataaaaatgccgagatttccacataataatctcggcatttttatttttgatgctaaattcataggtctatgaatagctcaagttttgttttttaatttttcaattcaatataatagaagaaactatgtttatcatcgatttgttttaaataccttcatattataaatctgtaaaataattaatataactgctgtagctataataataattatgtaaggtataggattatcttcaccttttacccccactaatggcgatgcaacaccaccaaataaaaactgtactaaacctaataaacttgatgaactccctctaccactactactttcatccatagctattgtaaaaccaagtgtcgcaacacctgtcactggtgctattaaaatgataaatcctatcgctaaaatccaaaagttccaatgattaagcaatacaatcgtcactaaaattacaccgataatctgaatcatcgtcatgcctctcatcaatttttgtgagtctataaaatcaacaaggtacccagtaagttgacttgatataatgagcgtaataccaattcctgcaaacatccaactaaattgtattgcagtcatgccataaattttttgaataataaacggagacgcagaaatataagtaaataatattacaaatgtcataccttgaatgagcattggtaatacaaaacgtagcgtcttcaataatattttgaagtttttaaacattgtctttaatccactacttgactcacgatttgtcactgttaatgattcaggtacttttaataaagaacctatgaccatgacgaagccaaagatagtcagaatgacaaagaccatacgccagacagaataatttaaaattatgccccctattgttggcgcaacaactggtgcaataccattaacaagcatcaataatgccataaacttagttagttcattaccactatacatatcacttgctatagctcttgaaataactgctgctgcaccacctgtcactccttgaagaaatcttaatgcaaccatcagccaaatattatgtacaaaaacaatacctaaacttgctaatgtaaaaataatcatagctataataagcggctttctgcgcccagttgaatctgaaattggaccagcaaacaaattaccaaacgctaaaccaatcataaacatcgataatgttaattgtgcgttagacgtcgttgtttgaaaatcatgtctaatatctggtaatccaggcaaaaacatatctatcgataatgctccaatggccgtcaaagatcctaaaataataataaatatcggtgaacgcttgttaaaatgcgttaaatcattcatatgactatctcctttatataatgattagtttataactatcacgaacagaaactaaatttaaatatgctcttttatatattagcattagtcacaagtttcatgaacatcattacaacttataaaaggtataaaatgatataaacctcagcacttcataaatttttccacaaaaaacaatcccttcaaagtaattcacactaattgtaaatactttgaaaggatgttgtttgtattccatgacacatgcatcttatttaagttttatactctatttttctgatgtcttgattaattgcaagcggtcttgcgagccttgttcaagctcatattctttatctacttgcttaccgttttcatttattaatcttacggttgcggtaatcttatcaccatgtttttcagcatctataatttgtggtgaactaatcatcattaaacttcctttagatacacgcttctttacatcatcataaaaagatgatcctttttttatatatgatgatacaaaatcaaaatccgactgattaaacgcagcattattcgctaaagaatatccagcaaagaattctatcaatttgttcttcaagctgttttcttctttttctttcttttcaacatagtcttcgatatcttcactgtcaaaattcaaagttatctctgtattgtattttaaatcgctagctttaatcgtcttcgtctgtgttgtaaatgttttatctttcgctttacctgaagctgaaatggtaatatctttattttgtggatatggaccatacgttttggaacttgaaaatgccatttcatggtcatttatagttacttttttagaactatcatttaattttgtatcgccttttaaagttacagatatatttgcttcttcaaaatcttcagtaacatctaccgtttcagaattactttgtctaaaatcaaattttaaatggcctgcaaaatcaccgttctcagttgatttcatagctggaattctatatgtccccggtataaaattacctattggcgtcactttatttgcttcagctataaccatctttttcttaccaccagatttaaactcatattttgttttttctttcggtttaacaattggttgcttggtaggtgcagtaaagctcatattatcgaaaaagatataacgtgtgccatttttacttacacgtaatatattttgaccagatctggtttgaatataagaagctacgctggtcttactcttattcaatttatgtaccgtatttttaaggtcgctgacaaattgcttaagcccaacttcatctttgatatagttaatgtatacttttgcttcttcagaatctactttattatctttagtacttaataatgttgctactttttgtttatcattattctcaatcgcattcactaatattttagtttgcgcttcaggtgaattgaagtttcttagtaaaaagaacaatataataattaagattaaaatgaaaaaaccaattgcccaaggcaccatttttctcatcttgatgttattagtttgtatatcttcatcggttgactttctatataatgcttgacgactatcaaatttatgtccacattgtgtacatatctgtacatcatcttgtgattgttgtccgcacttcgggcaagatttcatactttcacctcaattctgttcctcttcaattgttatatgtatatcacaaaaattatttcattattttaccattattattttacaaatattatcccaagaatacaattcaagaaatgattaactttactttagaattgtaccttattacattatttatgaaagtactctctcaattataactaaaaagaaggtgttcaatacatacatatttagtcttatatttgaacaccttcaaaaacctatttatgattgctatatgttttaatgcgatgattgatgacttctaatacttgccttacattttcaatatcttcagaatttaaatcattagtaatatcttgcgcaatatctgtcataatcgcattacgttctttcaaatatgctctacctttgtcagttaaggttatgaatttcaaacgttgatcaatatttaaatttggtttatctaacttaactaatttagcatcgattaactttttaattcgtcggcttactgcggccttatttacaccttgtctttgcgtgatttcactaattgtcaaaggttctttatttaacatacctaatacgttagactgctctaatgaaatttcatattcattttgtaaatctttcaacatttttgcagttaatgcgttaacgttatttataaactgctctaaaaattgaatatggtcttgtaaatgttttaccataattatttctccctaattactatttttataaagtatcctcagcaatcattgtatcgcacatctaaaaaacacaaaaatattgacccatatataatataacaaattaagatttacatgttgctgctttctccttgctttaataaattaaatcatctacatttatatttaatatttattataagcgaggtgtcagtatgttattgaatttattattaatatttatacttatcgttatttgtccgttaattttcaactatactctgacgttaaatttaacatgctacatcttagttgtcatatcgatatttttgtcactcatctatagcatcatgacctatactttcccttggtctatgtttgtaacatttataataatcagtattatcatgctattcaaacatagatatttattttctcatacttctagtcgcttatttattaaaaaattattatctttttcatataaatttgtactctacacatcagcacttctatttataagtacgattcagtcacctattgtgaaaggtttgtctatgtggttagctatattatgtctttccctgttactaacctttatttgttatctcgtttggacagtatcatatagacatagatcatacaacaaagaagttgatatcataattgtgttaggtgctggtatttttaccgaatttgtcacaccaatgcttgcagcgcgtttagatcgtgcacttgatatctatcaacaacaagcatcagcaacaaagatcattgtatctggcggacaaggaccagacgaaccaatttctgaagctttagctatgcaacgttatttgattgcacatggtgttgataaaacagatatactaatggaatctcactctataaatacatacacaaactttttatattctaaacaaatcatcaacaatttgtatcatgaagcagttaaaattgtttgtgtaacaagtcagtttcatgtattgcgcgccttacgactagcccaaaaattaggtttatctatcgatggtgtcggaagtcatacaccatatcactttttcttacatgtgctcatcaaagattatctaggcgtaatgtatcagtatagattgttattaacgttatattgttcaagtagttggtttatatgtctttacgccgcttttatttataatagttaatccacaaacaaactattattataggttgtttctaatattgcgtcaaactatctttaaatattcgttaatccttgattagacaattgttatattgaaaataaataaactaaagagtctgggacattaatccctaaaaaaaacagcagtaagataattttcaattagaaaatatcttactgctgttctctatttatacaatacttcgtattgaatggcttcgctatgcccatctggcacattactgtaaaattctataaatagaatttttgatgacgggtcccttcctagggtgccgtctcagccaccccaaccggcacattgttgtaagctgactatatgtcagcttctgtgttggggcccctgtcttcgactggcactgctccctcaggagtctcgccattaatactacgtattaacatgtaattttacttttaaatactttaaaaaaataagacactttggccaacttaagccaggatacaatttacaaatagcgacaaattctcaatttgttttatcctatgacctatttcaaaacccaacagatactagaactttaattccatttttaacaatgattcaaaataccttcggttatttaccggagtatattgtagctgatgcatgttatgatagtgagcaaaactatatggctattatagatgattttaataaaacgccacttattacgtatgtcatgtttattaaagataaaactagaaagtttaaaagtgacatttttaacactcaaaattggaaatatgacgaacttaatgatgaatttatatgtcctaataacaaaagaataggttttaaaagatatgcataccataatgatagatatggttttaaacgtgacttcaagctatatgaatgcaacgagctgtacattataaaatacatatcaaaaaagctgatttctatcaaataattaatagaaatcagcttttttacattgcctaagaacttaatgtcccagcctgttttttgtaaacccaaatcgtattctgttatctaacttttatactactatgtcttaaatcattaacatttagcgtctttacaagccactaatcagttattttgccatcttctaattcaatcactcgatctgcatattcaaataatcttcgatcgtgtgtaatcataataccaatcatttgttgttctttaatttgttgacgtatcatctcaacaaattttgttgctctatcggcatctaaacttgctgtgggctcatctgctaaaatgattttcggattattcataaatgctctcataatcgcaacacgttgcttttcaccgccagataactgatgcggatatacattcaagcgatcttctaaaccaatatttttcaaaagttgtattgctcttgttgaactttgttgtttggtcattcccgcttcttgacctacgagtgtcaattgctctatcacttttaaataaggaactaaatgtgaagattgaaaaataaaaccaatatcttccaatcgtaaatcactaggacgatgctgtttatcaaacaatggcgcatcattgtaaagcactgtaccactcgtttgacttaacaatccgcctaatatcgttagcaatgttgttttcccagaaccagaggcaccatttaaaatgacaaattccccttgttccacttcaaaattaataccttttaaaacttttgtttcagacaaaccttctccgaaatttttgacgatatcttcaacgactaatgccattattctgcacctccaattgcttcgataggatccactttaaataatttgataaatgatagtgaggcacctaaaatcgctactaatataaatatccccaccattaataaaatattttgcgttgttaagtaaaaaggcatcgttaccggcatcataaatgatagtcctactatgatgatcacagcaatacctaccccaattattgttagtgttaaaatttgtaaaactaacgcactcaataaatgtcttgtcttaataccaattgctttcaaaatgccaatttgtgatattttttgaatcgtcataacatagaaaaatgcacttagaacgattgctgtaatagcaaacaaactaacaatcatcatatttaacggtgcttgctctgcttgataactcgcaatattacctgttaaatctttttcactcacaacttgaacgtcatttattttattaagctcatctcgttgttgttgtgttaaatttttcactggataaaatgccgtattaaccttattcaatgcattaaatccgttatcgttcaatagcacaatggaactatgcgcatacattgtgtcgtttaaaataccagaaactctataactagttgaattatttttaaaatgtaatctatccccgactctaatgttgtctgcagctaacttatcattaatagcgacctcatgagcatttttaggataatcaccttttttaagttgtatgcgttgttgtttaacgtcattcattgtaatcacatcttgttctttattagataatttcaatgtttgaatattcattttatatggttcttgatgaattacctttttaatttgattctgttgcgtatcactaagttgcgatttctcaatttgcggctctttcattttttgaacaacatattcatcattatcaaagtgttcaaataacgaaatattctccctaccaagcccttgagctaaaccactaataaataacaccataatacttaataaaagaatgattaatgtgattaaaatataacgaaatttgtaaaacataatctcttttatcgctaatttcatatcgattcacttctccctatttcttctttagcgtcagtataaggttgaaatatgaactcaatatgaacaattgtttttttacgcaaaaatattttacatgtataataaatgaaaaagataagggagtttatagctatggtgcaatgtcttgttgtcgatgacgatcctcgaatcctaaattatatagctagccatttacaaacagagcacattgatgcatacacacaaccaagtggtgaagctgcattaaaacttttagaaaaacagcgtgtcgatattgcagtggtagatattatgatggatggtatggacggctttcaattatgtaatacattaaaaaatgattatgatataccagttattatgttaacagcgcgggatgcacttagtgacaaagagcgtgcgtttataagcggtactgacgattatgtaaccaaaccctttgaggttaaggaacttatttttagaattcgtgctgtattacgtcgatataatatcaattcaaattcagaaatgactattggcaacttaacgctaaaccaatcctatttggaactccaagtatctaataaaacgatgacgttaccgaacaaggaatttcaattattatttatgcttgcagcacgtcctaagcaaatctttactcgtgaacaaataatagaaaaaatttggggctatgattatgaaggagatgagcgaacagttgacgttcatattaagcgactacgccaaagattaaaaaaattaaatgccacacttacaattgaaacagtaagaggacaaggctataaggtggagaatcatgtttaaaacactctatgctagaattgcgatttattccattacggttattttatttagtgcattaataagttttgtattaacaaatgtttactatcattataatttaaaagcatctaatgacgcgaaaatcatgaagacgcttaaagaagcaagacaatatgaacaatcagctaaaccaacgcacattcaacaatatttcaaacatttagggcaaatgaattaccaaataatgaccattgatcaaaaaggtcataagacattttatggggagccatttagagaagatactttatcacaaaatgctattaacaacgtattaaataatcaagattaccatggtattaaagataaaccattcgcattattcgtaactggatttttcgacaatgtaacagataatactgttggtattaactttaagacaaaagacggttcaatagcagtatttatgcgtccagatattggagaaacatttagcgagtttagaacattcttagccgtcttgttaatgttgttattatttatctcgatttcattagttatcgcatcaacctattcaatcattcgtccagtaaaaaagttaaagctagcgaccgaacgcttaattgatggtgattttgaaacacctatcaaacaaacacgcaaagatgaaattggaacattacagtatcactttaataagatgagagagtcattgggacaagttgatcaaatgaggcagcattttgtacaaaatgtatctcatgaaatcaaaacaccattaacacatattcatcatttattaagcgagttacaacaaacttctgataaaacattaagacaacaatatataaatgatatctataccattacaacgcagctgagcggattaacaactgaattgttgctcttatccgaattagataatcaccaacatttattattcgatgataagattcaagtcaatcaactcattaaagatatcattcgacatgaacaatttgctgctgatgaaaagtcgttaatcattttagctgacctagaatcaatcaatttcctaggaaatcaacgtttgttacatcaagcattgagtaatttattaataaatgctattaagtatacagatgttggtggtgccattgacatcgctttgcaacatagtcacaacaatatcattttcacaataagtaatgatggttcaccaattagtccacaagctgaagcacgtttatttgaacgtttttataaagtgagcaaacatgataatagcaatggtttaggtcttgcaattacaaaatccatcattgaattgcatcatggtacaatccaattcacacaaagtaacgagtatgtaaccacctttactattacactgccaaataattcactttaatctctacctcctgaaaaaacatttctgtttttatttcaggaggtatcttttatattgattagcgctttctagccacttaacatttaatttctaccattcaacaaaatttaaatatatcgatggtcatttatggtttaataattttgaaggaggcattaacctatgatgaaactcaatttatttatcaatgcaaatgagacggaatcttatattgatatacatgcacctaaaatgaatgataacgttcaaagtattattaatgcagtcaatgatttagacaaatcacatacattaatcggatacatagacaaagaaatccatatcattaatgtatcagatgttataacattccaagttattaataaaaatgtaacagccattacaagcaatcaaaaattcaaactaaaattacgactttatgaactagaaaaacagttaccacaacatttcattcgcatttccaaatcagaaatcgtcaacaagtattacattgaaaaattattattagagccaaatggacttatacgtatgtatcttaaagatgcacactacacctattcttctagacgttatttaaaatctataaaggagcgcttatcaatatgaaaaatttgaaaaactcattatttattagcttaatcattggtttgtccctttcactgttctttagtatgttatttgcagacggcaaatattatccactgaacccacaatcaactattggcatattgtattataggcatttcacagaaactaccgtaatgttgatttctatcattttatggttactcataggcgtcgtctttttccttggagattttatctttaaatacacagattggagcattactaaagcaactataatgcatttcataacaacgtatgtcggattcttgcctttagcaatgcttgccggttggtttccactaacagtgcattatctaatcatattcacaattatcttcattgtggtttatgtattaatttggataattcaattctttaaaaacaagaactacgtagacactattaacaagcaactgaaacaattaaaatgatttttattaaccactaaaaaacggtaatgtctatcacattaaaaaagacattaccgtttcgtttattatttaacttgtaaatacttagttacttcttcattaattttatgatataaatcctcatgatctgttaagcgataaccaaatgacggcaccatttctttaatctttggttcccatcctttgaattcatcacgatagcatctctgtaaaacatcaaacataatatctacagctgttgacgcaccaggtgatgcaccaagtaatgcagctaatgtgccatcatctgacgtaataacttcagtaccaaattgtaagttacctttagaatcctcagtatccttgattacttggacacgttgccctgctgtaatcacttcccaatcttcatttttagcatttgggaaaaagactcttaaatcatccatacgctcatcattagataacatcaattgtgacactaaatacttcgtaagactcatttctttgatacctgcagataacatcgtcacgatattatttggtttaaccgatttaattaaatccatatgtgaacctgtttttaaaaatttaggtgagaaacctgcaaatggaccaaataacaatgaacgcttgccgtctacaaaacgtgtatctaagtgcggcactgacattggtggcgcacccactgctgcttttccgtacactttagcatgatgacgatcaatcacttcttgatttgtacagcgcaggaataatccacttaccgggaaaccaccaatatgttttgattgtttaatcccagtcttttggagtaatggtaaactcgcaccgccagcaccaataaatacaaaatcagattcatatgttgtcgtttcattagtttctaaatctttaactttaactagccataccccagatttctgtttcttgatgtctaatacattctgcttatattgaattcccacaccacgttgctctaaattatcaaataactttgcagttaacgcaccaaagttaacatctgtaccagtttcatcataagttaaagcaattggttcatcagacttacgaccttcaatcattaacggtacccaagatttcatttcttcttcatcttgcgataatttcattttttcgaataaaatacttttctttaacgttgcaacacgactttttataaaagctacattatcttcgccaatgacaaaactcatgtgtggcaccgcttgaataaagcgatctgggttatctaattgtcctgttttaactaaatatgcccaaaactgttttgaaatttggtactgctcatttatcttaattgctttactacaatcaactgtgccatccttaccttcttttgtatagttcaactcgcaaagtgctgaatgccctgtaccggcattattccatacatttgaactctcttcgccaggttgtgctaatttttcaaacactttaatatttttctcaggtgataattctttaagtaatgttcctaatgttgcactcataataccgccaccaattaagatgacatctgttttgctatgttgtgttgtcataacaaatacagtccccctttttaaaatgaataatggaacgttcgagaaatacgacatattaataccactttaaatcaataagtgtctcaataggttcccatggtgatgctctattactatctactatgtatattaatattttataataacgaaactactttaattatatactttatgtgcgatagcacaaagacaaaaccacaaaccttaacagctatcaaccaatttaatttgattgctgattactcactattcattttaacataaagcgctaccattattataatgtcaaacttctttcattaatgatccataaaaaaaagatgagatgttagaaaacatctcaccttctgtatatttatattttgaaatacgtttttttataataatgacaagatgaaagtccaaatacagatgaatattagtaaacatacactgtatttcaatgtcatttttaataattctgattccttaccaacttgttttactgctgcagttgcaattgcaattgattgtggtgaaatcaattttgccgctacaccaccaactgtattagcagatacaagaagtgaaccacttgttccaatttgttgtgcaacagaagcttgaattggtgcaaataatgagttgttatttacaactgatcctgtcataaacacacctatccaacctaaaattggtgatagaactgggaagacattacctgctttagcaataccttgacccattgctgcacttaaaccaccataagttgtgattttagaaattgctaagatgaaacaaattgtaagaactggtaaccacaactctttaaatgtaacgccgaataatctacctgcatctttaaagttaacctttttagacattaaaattgtaataataatagttaataaaatagctgtacctgtttgtccaataatatttaaagtcaatactaatggtttatgcgtaacttcgctgattgttccaggtaagttgaatttaaatactaatgatgataaagcaccatttggtaagaataagtttttaaagaatggcgcactccaaatcattacaatgactgttaatacaatgaatgggctccatgcatgtaatactgcttttgcagaatgtgcttttgcaggttcaatttcttcatctttattaacacgataaatgtgttttggttggaattttttagaaaatactgctaatgctaacattgttaataacggtggaataatatctgctaattcaggtccactgaatacagttaataatccttgagtaagtgtataagtgattgaaactactaaaattgctggtaatgtttctttaacacctctaaaaccatcaataataaagataagtaagaatggaataatgaaatttatgattgccaatgttaaagttgctgattgagaaacacctaatactgaaacatctccaggtaatttcaacgtttctacaacacctacagggataccaatcgcaccaaaagcaccagacgctgcatttgcgactaaacataacatcgcagcttttaatggattaaatcctaattgtgttaataaaagtgcacaaattgcaattggtacaccaaatcctgctgcaccttctaaaaatgcgttgaatgcaaatccaataagtaaaacttgaatacgttggtcttgtgaaatatttgtaatactatcttgaattgttaaaaattgtccagattcaacagtaattttgtataacaatactgccatcataacgatatagccaatcggaatgataccttggaagaaaccttcgactactgcaccagaagcgataccaactggcaatttgaaaaatggtattgcaattagtaatgttacaacaagtgttgtaatagctgcataaatacctttcattttaaaaacagttaaacatagtaaaaacagtacaatcggtattgctgcaattaaagacgataataataaattatcaaatgggttaaacgtatttactaacataggctgactcttctttccataaagtagtagtgtaattgcttcattaaaatcatgctctggctatagcattttgttatcgataacattttacagaacagtgagattaatgtgatttttttcacaattaaaatataccattttttcagactattaacaatatcactttcctatttaattgttttatttttcattttaaatctgttcatcaaaatgaattgtacttaatgtaatgaagtaacttatactattcatgaattttacataagaccgtgctaaaataaggaagatactacgatgaggaatggaagttatagcaatgattaaacagataaatgtttctaatatgcaaaagtttgaatctcaattaatgaaagctcagtctgaaggttatacacatgtcgttccatatgccaatgagataatgatttatcaatcgatgttagatgcggttcaattatatcctaagtctatcgtggttgattatactgtggatggacaatacaaaaatgattgtcactatttcggtcaatcatcgatcaacattgccgattgggctcaaaacaataattattatcctaacctgatatatgcgattcaacagactcttgatttaatacattattactctgtagaaacgattttcgatttagctttattgacacttctgaaaggtgatttatcaatcgatggtcatgtcgtttttgattttaaagcccctatagcaacaagtgcttcaatatgggaaactattaaaactattgaagattttgatatgatgtctcagttttatttgaataaaatggcttatattgatcatcatcctataccttttcgcaacctttttatcgaggattcagaacaacttaattcgccagataattggttgtattctaccaagtttatgctacctaaatggttatataaaatagcaaagcaacgtgctgataacaaacaattacaaaacttcggcctgtatacgaagcaaccaaacgttttaaaagatcacatcgtttttatcggtgatcatcatcaatatataggtaattcaaaatatttatttacttacttcgttaaacataatccaatgactgcctgttattttgttactgacgatcgtcgcggaccacatttcatatcacctaagtctgaaaaagctgacgaattgattaacagcgcacgcgtagttatagttgaaaatgatatacctgaaacgttacaaccaaacggtactttaattcaattacatcaaggcacaccaataatgcaattatttttagatagtaaagagcctattaaaaatatagaaacacctttttatcgtgctaaaaggtataatcgctggttgcaattcgattatgttatacattctgctgatgatattagccacttttatcaaacggcttttcctagtcaccaagcaaatgtattggcttatggtaatcctaaacaccaatatttactacaaaagagtaacgaaagtactactcaacaacagtataagaaatcgtttaaaataaatgatcaaaaaccagttttattatacgcacctattggattagtgagtgcgcaacaattaccactatcagatgctttattcaaagcctatcatgttgtggttcagggtgttgatgaagcgatcttaccagaagaggcgcttgttgcaccaaagtatcttagtgctcaagacttaattctaatgtctgatgtcgttatcactgattactcaaatataatatttgatgcgatggctatagacaaaacagtagcattatacactccaaatcacagtcaatacattgagtctcaaggtgttaacgaagatatttggcgtcatctatcaaaaatttggtatacagaccgacaattattaattaataatttaatttcccaggcaataccagtgattaaatatccacaaatacaacataaagaacaaccattagaatctatttcacaacttatattgtctaagatgacatctaatcaatagtgtttaaatttctcagtggctgtgaatgaggtttaaaagtactataaaacgtaaactttgatactttaaaatacgcaaaaaacggtaaaccctaattcatattatagagtttaccgttttattttttaacttgcatcatagttatattaacattattgttggtagtttggatcagtaaccattgcttgtccagtataatcaaccgttacaattgaatattttccatttgcatttgggtctttaaaactaaacacatacttatagttgccattatgttcttcaatagaataatcattatacactttattattactaccaaatttatttgcttcattattagccgcatttaaagctgtttggaaatttggcaattgctgtaaagcttgatttttatttccattaaacggataaatttgacgtgcaaccggcgcggcattttgtccataatatggtgcaacgtaacttgatttttgattattattcgcttggttattacttgattggttattatttgtttggttttggtcattgtttgttgcatttgaattagattgttgctggttatcgtttgcactattatctttattatctttgtttacgtctttactatcatctttattatctttcttatctttagatgaatcatttgtttttttatcttgttgttcagttttcgctttatcatctttttctttattaccgtctttttgttggtcactatcttgaccacatgcagctaaaaataatgataatgctagtaaccctgtaactaatcttttcatacatatctcctcctataattcgatattcattgaataatcttgaaatacatatctaccatgtgtatcttttcatggcttgttaccaaagacgtcaacattaatatgatctgaattatcacaatatccataactacaatctaaggttctttttattataccctaatttttgttcattattatttaatttttgtgaattttatgttttctataaatttaattattttactttaacaattcattacgcatttagcatttcaaggtatacacaatatttattactatgatttcattttatctgctgcaaaaacaatcattataactctttttccataattaaatctgtatccgttacatcacctgtttgaaaatgatgttcaccaaccactttaaatccatgacgtttataaaatgcttgagcacgaggattatgctcccaaactcctagccaaattttatgtttattatgttcttgagcaattttttcggccaattctatcaattgtgaacctcttccgccaccttgaaagtctttcaaaaaatatatgcgctgcacttctaaataggtctcccccatttcttcagtttgagcactattaatattcatctttatataaccaacattcgcaccatcttcttgataaaaataatgaaatgaatctacatggttaatctcttgtgtaaatttctctacagtataattgtctttaaaaaattgatcaaaatctttgtcatcatagtaagaaccaaacgtgtcataaaatgttctagttgctaattcaactaattcactagcattttgttctgaaatttctttgattatcccagccatataaatcctccaataaacagtgatcgaatcaaaatattacttatgttatttttcagccaaaactatttaaaaatacattaacacaaatcaattacaaattgtattgattgtgtgtaacatcaataaatgatacatttattccagtaaaatggccgtattttcaaaagagaaaaagagaggatgtatcgttgtgatagaaacatttaaagcgtttgtaattgataaagatgagagtggtaaagtgacaccaactttcaaacaattatcgcctactgatttacctaaaggagatgtgctgattaaagtacattactctggtataaattataaagatgctttagcgactcaagatcataatgcagtcgtaaaatcgtatcctatgattccaggaatagatttagctggaacaattgttgaatccgaagcaccaggatttgaaaaaggagaacaagtaattgtaacgagttatgacctaggtgtcagccattatggcggttttagtgaatatgcgcgtgtaaaatcagaatggattatcaagcttcctgatactttaacattagaagaatcaatgatatatggcacagctggttatactgccggtttagcaattgaaagacttgaaaaagttggaatgaatattgaagatggtcctgtactcgttcgcggtgcttcaggtggtgtcggtactttagcagtactcatgcttaatgaacttggttataaagttatcgcaagtacaggtaaacaagatgttagcgatcaattacttgaacttggtgccaaagaagttatcgatcgacttcctgttgaagatgatcataaaaagccactcgcatcatcaacttggcaagcttgtgtagaccctgttggtggcgaaggtattaattatgttacaaagcgtttaaatcatagtgggtcaattgcagttattggtatgactgccggtaatacttatactaattctgtattccctcacattttaagaggtgtaaacattttaggaattgactcggtatttactgctatgaaattaagacagcgcgtttggcgtcgtctcgcaaaagatttaatgcctgaaaatttacatgagatcaagcaagttattacatttgatgaacttccagaacaacttaacaaagtaattaaacatgaaaataaagggcgcattgttatcgatttcggtgtagataaatagtattcatgaaaaagacatcccgttatgcgagatgtcttttttaatttagtatttgatatacataccgcctgaatctggttcggtaggtataaatccaaattttgtatataatttatccgctgggtagtctgcaatcagactaacgtatgtactctcaacagccacacctttaatatattgcataatatgctccataattagactgccgtaaccttgaccttggtaacttttcaaaactgcaatatcaacaatttgaaaaacagttccgccatcgccaatcactctacccataccaattaaccgatctttatcatacaaggttactgtaaataaggcattaggtaatcctttttcagctgcttcgcgcgtctttggactcatacctgcgttaatccttaatgcgcaataatcctcgcaagtcggaatatcatatgtcactttaaccattatttaccccacttttcatcacacaatatatcaacctagtataaatgtttatttacaatagtcttattcgcttctttaaacacttcatgatgacttgaaacataaccctctgcattcgcatctggttggatatatgttttagcaaggttcgctgcatttgcaccatcactaaatgcacttgcaattagatgtgattttgcatcatgataaacaatatctccacacgcatagataccaggtatactagttgtcgtattaccaaatcctttaacacgacaatcatcatgcatatctagctttgaagatgtttcactcaataatgtattacaacgatcaaacccatgactaataatgacatcgtcaaatttaactgtatgcctatcgccactttcaacatgttccaaaacaacttcacttatatgcgtttcatcatcattgccgaccaagtatttaatacgtgtttttgggcatagtttcacatttaaatctgtcaccaacgttttcatcgcttcatgaccacttacatcttcttttcgataaacaactgtcacgcttttagcaatcttggcaatatcatgcgcccaatctaatgctgtatttcctccacctgatattaatacatctttatctttgaaacgtctgtaactttgtacaacataatgtaaattagttaattgatatctctctacacctttaacatctaattgttttggattaataatacccgcaccaattgcaatgataactgctttcgatgtatatatttctcccgcttctgtttcaacttcgaaatgacgttctgcctttttcctaatatctaccacacgttcattcaaatgaacttccggtttaaaatataatccttgcttaattgtatcttttaaaatttcatgacaaggttttggcgcaatgccgccaatatcccaaataattttttcagggtaaattctcatcttaccccctaattcagattgaacatctatcaatcttacagacatatctcgcaatccagcataaaagcttgcatacaaaccagacggaccgccaccaatgattgtaacatctttcattatgtgcctcctatgactctctatattcatttctttcattaacgtgctcaaattgataattattatcatttaaagccattatactattaatatttatattgttaaaataaatcgcatagttagccatgaattatcaataactatcccatcacaatataaaaacacacctttcaaagtaagaaacaacaatgttcctttgaaagatgtgtatattttttagttctagttatattattttttaaaagactcatcacgtggttctttaagaattgcttgtcttaaaaggaaaaatagcaacaataaacctgcaagcatacctgtgtgcccaatacctgcaaagcctgcaaatgcttctggagagtatgatttaccagtgacttggaagaatccttttgtcaccatcatacctatagtaacgataacacctatgttatatacatagaagaaccagttaaataagtagtaacttgataatttaaataacttctccaatggtaataatattaaaaacataaacatacctaaaataagtgtatgtgtgtgtacaagtgataattgtgttgtaccagtaaaatcatatgcttttgttagctctctatagaaaaagccactaaataaacctatgatcatataaaaaagaaatgaatataataacctacgcattttgaatcctccctcaccttttcattatatccgattatacctattataacagtgacaaaaaagcgaagatatgacacaactgaatttggtttagcacatagtatgacagctaaaataactttacatcaagcgctatacaaataaaatagctataccatgacgctcgctacaaacgtcttgtatagctattatttctatttattaaattatgacggcacttcagtacgttttgtgctatgttttctaacaatagctgaaactaaacttgatacagcgccaaaaatcataaaccctataaacatccacattgtactatttaattcaatatgatgattcaagtataatagttctcttacacttgttgcatagtgtgtgaatggattccaatcatatacatatttttgataactttcaggcaacatttgtttaggtaacgttacaagttgcatactaaagaacattaaaatgaagaaaattggaactgacttcatacctagccataccataacacctaaaataaggcccacgaaaccaagaatcgcaaatgctacaaaaattgcgatacgatttggatggtcaaaatcaaatctttgaacgccttgcatgaaataaatataaacaaagctacctgcaaatgctgcaacaactgcaaatatcatctgtccaattgaagcaatgatacgatgttgcacgacgatattgttactagttctaaatgcaaagaacaataagatagacgttacgattgaacctatccaaattggcataaacattaggaatggtgcattaccacctgcttggtgatctttaactttattaagtttttcattatccacttttactggattcgtcaaaccattgatgtccgcggcattgactttaacattttgactcgttaatgtttccaaactttgcttcgtaatttgagcattaatattatcacccataccagttaacacagctgatgcaatttgtgaaccttgtaagcttgatccttcacttacaatcgttttaaatttagcctgcttaacctctacttgttgattccccattttttgtttcatttgttgaaccacttgtggcggaatttcacctgaagcaactttttgttgcatttcttcttttttactatccataactactttttgtgttttactcatagcatcttttgaaaagtctttatcaataatagctactccaaagattttttgatctttcaaatctttttcaaggtctttttcactatcaaccttaacccatttaattttattagaatcactatctaataatttatcctctaattttttaccaatgttaacatttttatcttgaatcgttgtacctttatcctcgtttaatataccaattggtaaatcttttggtttaggattatatgcaggataaaaagctaaagaaaagattaccaagataatcatagttgctattggtgcaatccataataatttatttttaaatatattcattttattaattacctccttattagacaatgtgttgaatatttcgcatgttgtctattataatatgtaagtgggaataaacaatacacaatgttcatcaatacgttcattaatagacaaatacacccacattgttcaataacacaaggaggttgatttatttttgaaagaagataggcgaattagaaagacaaagtcctccattaaacaagcgttcactaaattactacaagaaaaagatttagaaaagattaccattcgcgacataacaacacgcgctgatatcaatagagggacattttacttacattacgaggataaatatatgttactcgcagatatggaagatgagtatatttcagaactaacgacatatactcaatttgatttgttacgcggttcttcaattgaagacattgcgaatacttttgtaaataatatactcaaaaatattttccaacatattcatgataatttagagttttatcatactattttacaattggaacgcacgagtcaattagaattgaaaatcaacgaacatattaaaaataatatgcaacgttacattagtatcaatcattctatcggaggcgttccagagatgtatttttacagttacgtttccggagcaacaatttcaattattaaatactgggtaatggacaaacagcccatttcagttgatgaattagctaaacatgtgcataatattatttttaatggtccattaagaataatggcagaaaaccgtttgcataaatcaaaccttgattcactaacttaagtaatactcgcttttcctaaatcctttagaaaggaactatatatcatgattacttcattcagacattctgaagatatagataaacatattataaaaacaccattagatcatacagcgtcatggattaatgtagtagaaccagaccgagaagaaattgaaaatcttatggaacaatataatatacctgaagactttatacgtgaccctttggactcagaagaaagttcccgtattgaatatgacgaagatactggttactcattaatcattattgatttacctatcgtcaattcaactaatcgtagcgttctatcttttgtaacgattccattaggcattattattggcaacggtattatcgtaacagtttgtgacgctgaaaatgaatttttagaaaatttacctaagcgtgatattaatttaaaatttcacagcagatttgcattagaaattttaactactattgccgaccattataatcgtaacttacgattacttaataaaagtagaattcgtattgagaaagaactaaaaaataacattactaacaaacaacttttcaaattaatggaagttgaaaaaagtttagtatactttttagctgccttaaaaggtaacgatacaattattaaaaagttattccgtttacctgcaattaaacgttttgaagaagatgaagaattactagaagatttaatcattgaaaataaccaagccatcgaaacaacagaattacatcaacgtatcttagaaagtatcacaacatcatacgcttccttattatctaatgatatgaatacgattatgaagacattaacacttttcacggtactattaacgttaccaacactcgtatttagtttcttcggtatgaatgtgccgttgccaattgatgaccatagttatatatcttggattattgtggtaggtatttcattaattcttgtcgtaattgttagtattttcttatggcgtaaacagaaattataactaaattaaaaggtatgacagcttaaagtttcatcctattgcatttgcaatgactgatactttgattactgtcatacctctttttttattctacaacttctttatttgcttttcttttagataaaattaaagtaactgttatagcaatgatgaatgatattgtcataccaacaaagtagtgtaaccatcctgcatgtactggattgattgaaataaatcctggcaatccagcagttcctaatgcgattgctttaaccttgaagaaagcaatatatgctgaaccaatacctgatccaacgatagcgccaataaatggatatcttagttttaagttaacaccaaacatagccggttctgtaataccaagtaatgctgaaatacctgcggcagatgccacaccttttaacttcttattttgtttaataataaagaacgctgcaattgctgcaccaccttgtgcaacattagacattgtcgcaatcgggaatataaatgatccacccgttttagtggcatctgcaattaatgtcgtttctacagctataaagctatgatgcatacctgtaataacaatcggagcatacaataatccgaatattaatccaccaattgcaccaccaaattcataaagccatgttaaaccatctgataaccagtaacctaattgtcgagtgattggacctacaaatgaaaatgttagaaatgctgttataaaaatagataacaatggtgttaacaaattatctaacaccgttggaataactttgcgtaaccctttttcaattgaggctaagatataagctgctacaagcataggtaacacttgtccttgataacctacttgattaatatgcaaaccaaaaacatcccaatatggaatagccttacctgcttcaactgcttttgggaaatcgtatgcgctcattagcgatggatgaactagtatcatacctaatgcagcacctaaaaatggattgccaccaaagcgttttgctgcactaaatccaattaaaattggtaataatgtaaatggtgcattcgcaaaaacatttatcatttcagctaatccagcaaattgactatatacatctatcaatgatttacctgaaaagaataaatctttcgcagtcaaaatgttatttaaccccattaataaaccaccagcaacgatggctggtataatcggaacaaagatatctgaaagcatttttacaaatcgctgtaacggattcatatttttagcagattgtgctttgacttccgaagtggttgatgcttcttttccagttaatttttccagttcactaaatactttattgactgtaccagacccaataataatttggtattgtcccccagtagaaaacgtccctttaactacatccatattgtttagcgcctcttcatttactaaactttcatcatttaaaactaatcgtagtctcgttgcacaatgcgccattgcatctaaattctcttctccgcctatcgcgttcaaaatttcttctgcggattgcttataattcatatatttagcctcctaattagaaccggttccatttattccactttattgtaaccggttccaaaaatatttgcaacactctattatcattttatataaacacctacaccatttttgatagcgtattcatttttattgctatactacatgcatgtatattaacattaattatcggaggtaattttatgaaagaacgtggctatatcgaacagctttggcgtgaggaaaaatatcatgtattgttacacagtcaacagtcttaccaaatgataaggaatgctttaaaaacggatttatcacttcatcaagttcaacaaatgattgatgttgctttgttaattgaaccgagtataggaagtgtatgtaatgcttttgatcatatgtggggatatttaaaaaaatgtgcgaatgaagaagaaagacaacaatcaaaactacttaaagctgattttattaatggtaaaatcgacacccaaactttattagattttttagcagaacttgctaataaatatgatgttcaatatttactacaaagtcgtgttttaaacacaaaaagaaagagatagattgaaactttagttgtaacggacaaatagtagtcattggagttcagcaattcatactttgtactaaagtttactataatctatctctcaaggtttaaatgtacatatctatattaaaatgcgtttcatgatgttagaagataccatacacatttaattagttacagcataaatcaatttatacccttaattattacattgtttatattttaaattcgggggagtaattttaagtaatatcttgttgctgctaattctattgttaataaattgatattagatgtagaaattgagtgtgaaagttaataatagatgatttagctagtaacataattaattcatatatagtcaaaaagttctgttagatactgttcttgatgaatattctttgatgttaggtgttagctattctagatgagtttcttagatgtggatgcctgtcttgatgaagttatctatgatgttaatataatacttgatgttgattcttagatgttagtgcgatttcaagatgctgattctttgttgttgcactatcttggtgacgtttctagttgtttatagttatcgcatctcttgatgtaaaatctaagatgtttatgcatttctagatgttaattcttcgctgcttaagaattatcttgatggtaaatctagttgtgccatgcattttctcatgatgaatctaaggtgttaattcattgatgtgtgctgtttcttgttgcttcattatcttgatggtgaatttcgttgtctaatgcactttttcaaatgattattctaattgttacggcaataactagatggattttcttagatgttcacttttctagatgtttatacttatcttgatgttttctaaacagaacttttaaacgctttattttttagtagattgtttaaaatttcttagttgatggttattgttgttgatttgaataatttgtagcgaatattttgtaacagggctactaagaatttttataacaagaagtgatttcaatcgtactaattttcagcgtttgatgacaaaagtgtatgtccaaacttaaataatggcgataaaatttaagtcatgggtacatttaatgttttttgattcaaacttccattttggtcaatttgctttttttataacatagttgaatatcaataaaagattagcaagttagttcaaaatggctatgtattgttttttgaaatacataggtttgaaatctatattaattatgcaccaaataatttaattagactctatcgaaaatttccaaattttgcttactatctttctaattttacttttatattgtgcgcaatgcataaaaacaagcgttttcctaggagttttcattaatttcttttatttttcactattaccttttcaaaaatattcaactataataggtatactatccatgattttaaaaatttccatgttttacatttaaatgatagatttcaatatatattaggcaggagagagaaatatgacatgccaacttaaaatacatcatacattatcgacaataccaagtcgtaatattaataatattatggtgctattttcacttacaagtaaactcaatattacgattaatggtgaaaccaaagacgtaagtaattatattatcttaattaaccatggtgatatttataatattaaccacggcgaaaatataatcgaattaatgatacccgttttttatttttatcaacaagatgatgatttctttaatggttatttagatcgtcatttattacaatcaagtaattatattaagtcattaattgccgatttaatcagtacaccaacaagttcttctttaatggggaaaaatataggtcaaagtattatagacactttacttaaagaagcttttataagaatagatcatgaatatttaccaaatattgctttaagcaatccggtgttcatagactgtgtaaactatattcatgacaatattgatgcgcacttgtctttaaaagatatagcgatgcattgcaacatctctgaatcatattgttctaatctttttgttcgatatttgagtatgaattttaaagattattttacaagtattaaacttgttaacgccatcaatttattactttctacaaaacattctattacaactgtttctgaattggccggttttaacagtcatacaaattttgcaaatcaatttaagaattacttgcattttagtcctaaacagttccgttcactcgtttccaagattactgaaccaccacaaatacacttccaacaagataacgtatcacaattcactgagttaatttcaacaattgatttaacagctcaactggctacaaatacaacagatattcatatagatgattttaatccgaaagatcgaagtcagcgtgccaaagtatttgttcgatttagtaatttcaatgaactatttcaatttattttcaatgaatattacgatattaactttgagcacttaccaaaacctgtcgttttcattgacgatattcacgatattgagattagccaaacgaattacaacctgttaaatagatgttttgaaaagcttttcgaaaaaaatataggtttagcaatcgctattaaatcaacacaacaattcgaaacgatgaagcaattaatactaacatttttacaaggcaatcaagactataagacaagcaagaaattagttaaatttatgctcgtattttgctctaattctatgacagcagaagaaattcatttatgtcatcttaaaattaaaaacaaaaataaagaaattaaatatagtgtgacagtcgatggctttttagaaacttattcaaccgtggaacaagtttatgatgtcatgcagcgtcttaaattccattattactttattgatattgaaaattcaaaaactgcaacacatcttatcactaaaaaccaacactatcatcaaactgacactcattttgaacagtataagaaatttattttagattcaggtatatcatcaacacaatttgtatataataacctgtctgtaagcggatttaaatatactaatgatggtaagaatccaattcaattatctgacatagtgtatcacttaatcgcattattacgatatggcggtggcattagctatcaattattagatgaccattcaaattatatttccttgtacaacaaatatggtagccccctaccattaatgcatttatataaaatgtttagaccttttgttaatgaagatattgaaattacaaataattatgtattgagtcgtaaagataataactaccatttcttattattcaataaaattaatgatcgatatatgtcagacgtaaaacaagatttcattttccataatgaattacctcaagactctttgatgattattaaaacattgaatcatgaacatggttcaattcaacatttgcttccaataagcgatcaacttgtttatatagaaaaagaaattttagatgaattagacaaaacgaattaccctaaaacggagcttgcagttcaagaagaaactggtcgtacatttgaactcaagttaaatcacgacgaggttaaatatatttgctttaaaccaagctaaatactaacagtcctcttgtgtttagtttcttacgttaaaggctatttatatcataaggagatgatttgtaatgagtaactcacaagcaattcaagcaattgaaaacgtgttagcaacgtcaaaagttggtgtattatcaactgcatataataataaacctaatagtagatatatggtcttttataatgatggtcttactttatatactaaaacgaatatccattctgctaaggtcaaagaaattaaagataatccagcagcatatgttttgttaggctataacgacacaactaatcgtagtttcgttgagatggaagcgacaatcgaaatcgttacagaacaagaagtgattgattggctatgggaaacacaagacaaaagctttttcagttcaaaagaagacccagagttatgtgttttaagagtagttccgcaatccattaagctaatgaatgataaatcattagatacacctatcaaaatcgatttataacacaaagtgtatataggaaataacttttatgaattctagatataacaatgttaaatacttaaaataactcgctataattaaagtgtttaatatgtttacaattcaatttgcaatgtattgttttttagacacactttattcacatttaacgtgattagggtgtgtctttttaaattaattttatgtaatataaatactgcatttgcaaactgttgcacttttaggtataacagaattaactacatttaaggagattgatgaaccatgaaaaagaaaaaaggttttggtcttggtattagtttaatcgccatcatgttaattgtatgtattgtattagtaatcatgatgatgactggcggaaagaaagatacatactatggaattatgaaagataatactactattgaaaaaatgattagtgaaaaagatgaaagtattgaaaaaaatgttaaattaccttcagattcagatgttaaagttaaaaaaggtgattttgtaattgtttataaattagcagattcagataaaattgttaaagttaaaaaagttgaccatgacgatgtaccacatggtttaatgatgaaaattcatgacatgggcaaaatgcacatgaaacactaattgtaatttaaattacaaattttagttgccatcaaggtatatacgagtaaaagcagcggtaagttgatttccaatttggaatcattttactgctgctttttatatttgaaatactttcatattgaatagctccacttgccgttcgcctgcgctttgcgcatgcataaaagcccctaacaacctgaggtcactgcgctccggttcgcctgcgctttagcgcatgcataaaagcccctaacaacctgaggtcactacgcttcggttcgcctgcgctttagcgcatgcataaaagtccctaacaacctgaggtcactacgcttccgttcgcctgcgctttagcgcatgcataaaagcccctaacaaccaaaggttgtaaggggctttaaatgtcagatagtattttttaaattgattttaaatattcttgaccttttgctttgtcatatacgttttcccatttagctataacgattgttgataatgcattaccaataacgtttacacatgtacgtaccatatctaagatacggtcaacaccaataattaatgctaaaccttgtgccggtaagcccatggcacctaatgttgttaataaaacaacgattgaagttcctggtactgccgccatacctttagacgtaatcattaatgttaacatcaacacaatttgctctgataatgttaagtgcattccatacatctgtgcaacgaataatgctgcaatagattgataaagtgctgatccatctaagttaaacgtataaccaattggtataacaaaagaagtaatttcttttggagaaccgaagttttccattttcttcatcattacaggaagtacagcttccgaatttgatgtagaaaatgctaaaagcaattcacttttcaagattctaataatattcatgatattaataccacacatccatgcaactagtcctagtatagcgaatacaaagaacaccattgcaaagacaacaactaatactaattttaatagtggtaataatgcggatgcaccaaatgtaataattgtagtacaaatgaatgcaaacactccaagtggtgctaattttaaaattttattaatcatccagaacacagcttcaagcgatccgcttaaaaattctttaactggttctgcttttttacctacagcagctaatcctaatccaaagaatactgcgaagaagataataggtaataattcacccttatttaaagcttcaaaaaagtttgtcggaataatatgtacaatggtatcaataaaatgatttccatatgtagattgttctgctgcatgtgcagttgattgatatttagaaatatcacctttaggtaattttgttgggtctaatccagcacctggtttaaataggttaccgaagataatccctaaacctattgcgattgttgtaataatttcaaagtataaaattgttttccagccataacgccctacagttttcgattccccaacgttcgaaatagaaagcgctagtgagcaaaatacaactggtataacgatcattttaattaaatttaaaaatacgtcaccaaatggtttaatgtaatttgctacgttttcttgtccatataataaaagtcctacgacaacacctaacactaatgcaataacaacttgcataggtaggctaatttttctcttgaatagagccatagtacaaactccccttcatctgacatcactcaattatatcagaaaattgataattatctataaaaaattaaaatatttatcttttatagatgtcaaaaatcactaatttccatacaaaaactgtttacctcaaataattaaaattgaaggcactaaactgcttcaccagtttaacgtttcactattttgatggtttataattttgattgaaatatttatgctttgcagttttcaaacttttcttagtctctgtatcaaagccttcaacaaataatcctttattagtactgattggttgcacaacataagttacaccaggttcatctttaaatgtaacttccttatagaagagaccttttttagcactatactctgttttttctgatttaattttatcttttagatttttctcttccaagtaactgtcaattagttgaatattcttatggccttgatatgttttcagaccaaagaaaaatgctactgcaacaattaatgaaataaataatataatgataactttaatcgcgttttttttcttcttcattatgtaactcctttttgcttatctattcagtatgaacgaatcaatttatttaataaagagtttttaccagattgtaacaaatttttttattctcaatattattatagaaatcgaattacatacacgatgcttttaaaaaatttaataacaaattttattttactatctatcaaaataattgactacttttaacaattaaggatgatacaattacatttttttcaatttaaaaaatcagtcatatcagtaattaccgatgaaaatactaagatatcgatatattttgcattatttaacatttgaattcaattatagacaattcaataattgcgatgaaatcagtacttgacaactattacacttcataatattgtttattttaacaaggagtgattggatgtatgtagaaaacagctatcttagcaaacagttgtgttttttattttatgtttcttcaaaagaaataattaaaaaatacacaaactatcttaaggaatatgatttaacctatactggttacattgttttaatggcgattgaaaatgatgaaaaacttaacatcaaaaaattaggtgaacgtgtgttcttagattctggaacactgacaccattactaaagaaattagaaaagaaagattacgttgttcgaacacgtgaagagaaagatgaaagaaacctacaaatttctctaacagaacaaggtaaagcaataaaaagccctcttgctgaaatttctgttaaggtctttaatgaattcaacatttcagaacgagaagcatcagatataattaataatttgcggaattttgtttctaaaaattttgactattccgacaaaaaataactccctatcataaggtgatgggcagaagtatgcatcgatatgtttattcattatctttattgcttgtataaatctcgatgctcagttcttttgccctgattccttatcaggcacaaatctacccatttattacttttttatctccccttttactttaacttttttaatactactcatataatggctttgtaatacaaatttctataatggaagtgatgatattgaacttcaatcaattcgagaatcaaaacttttttaacggtaatccaagtgatacatttaaagatttaggtaaacaagtatttaattacttttcaacaccttcatttgtaacgaatatatatgaaacagacgaattatattacttagaagctgaactagcaggtgtaaataaagaagatattagtatcgatttcaataataatacgctcactattcaagctactagaagcgcaaaatacaaatctgaacaactcattttagatgagcgtaacttcgaatcattaatgcgtcaatttgattttgaagctgttgataagcaacatattactgctagttttgaaaatgggttattaaccattaccttgcctaaaatcaaaccaagcaatgaaactacttcatcaacatctattccaatttcatagttaaatttaaaatgaatacactactaaagccttaatgtcatgctacgaatattgcgcatgatattaaggctttgtatttaactaaatgaatggcatgtattacatatcaaccgtttttcaatgagccatattctttttggtataaatgacgcatggtaaataatgcaatacatccaaataccgctaagaaaataaatgctaaatgacttgatcctgttaaattagctacgtacgtgattactagtggtgggaagaatcctcctaaaccacccatcattgatacgataccatttgcggatcccgcttcatttaagaagtatgatggtactaatttgaagattaagccgttaccaatacctgcacaaatacttattgttaaacagcctacagtgaataatgcgatatggtctgaaatacctaaaataatggcaccgataatcataacaacaaaatcaatcatcaatactttaactgcattaaatttatcacctaaaatgccacctattggtcttaagaatgttgccagcgcaatgaatacacctgatcgaataccagcatctactttgtcaattccaaaatgatttactaagtagttaggtaagaaaataccaaatgctacaaaagcaccaaaagtaataaaataccaataacttaagtaatataatttgtagtttttagataatgttttcatttgagccattaatggtactttaattttacgttcttgtgtgtcaccaaaaatgaacataattaatgcaaataaagcgataataattaagtaacttctaactgttgtttgccaaccaataatacccgctatcggtggtgctaaaaatgaagaaactgctgtaccgatatttcccataccataaataccatttgctagacctactttttctttagggaaatatttaggaactgatgtaacaccaactgagaaaattgcaccacctacaccaaggaaaaatcctgaagccattaacatacccggtgtttgtgcttggcttaagaaaaatatcgggaataacaatacgataaaactagtaaagaatacccatttagcgccaacaatgtttgttaaataaccaaatggcacacggagcaccgatcccaaaataactggtatcgctaaaatgattgatatttgaccttcagtaacattgacatcttgtttaataaagggcattaatggcgcaattatactccaagccataaacccaaccactaaacttaatgtttgtaatgtaagttgaaagccaccttttgttttgtacatacgtttcaccttcatcaaaatcatttattttttaatagatatcaatactctgcctatatattagaggtcaatgttatttaaaaatgctttcatttatatgaaaacattcaatatagacaaagtattgactacatatatattttattatgattgtgaaaaagtgaacataaggattttcccttatttatgaagtgatttaccctatacaatgtccctttaagatgcttttagacacttattcgccatcattttaatcatattatttaggaacactcacatacttttcttaatttttttcaattagttacaattactgcttgaaaatcacgttacgttatcctttatgctgacaacataaggaggtttatcatgtataaaatcaatattattagatcagattccgtctataataatatactcaaggcaccaataaacgaccgtgattcaattttcactaaagaaatattagtaccttttaaaaagaaatttgaggtacaacatatgcctatttataatgatgacaaacagacaatgagtgcgattcaatttttagatgcctttcaaatttctcccaaagatttacgcatgtctgaccaaatgtcaatacaatacctgaataatgatttctggagtaattgcgaaaaatatttaaaagttgctatagatcaattttcaaattatagtatctcatctcaagtttctaactatcatttcacagtattacttggagatcgccaaaaaccacttatgtatctaaataaaaatcgcggtggtgatggtggcataccaggttatattatgatttatttagtgccgagtacaagtacaattaattctatgaaaagcttaattgcacatgaagtaaatcataatatgcgctatcaatatattgattgggatggcggaagtttgattgaattgattattgcagaaggattagctgaaaactatgtagaatcattgtatggtaaagcgcatattggaccgtgggtaacaaatactaattgaagtcgtgataacgtaaaaattaaaaatactatttataatcatttacatttaaagcatatatttgaatcgatgccttatctctatggtgatgatattaataaacttcaaggtaggcctatcgttggcttatctcatgctgccgggtatgcatgtggctatcacttggtaaaatactttttacaaaaaacaaacatacctattgaagttgctacaacacttccagcacaaaaaataataaatgaggtgactgaattttggcatacacatacactttaaaagatattattgaaattacaggtgtaactaaaagaactttacattattacgatgaaataggattattagttccagataaaaatgataaaaattatcgggtttataaacagcaagacttagaaaaattacaaaagattttaatactcaagtcttttgattttgatatcgctaaaataaaacaatacatttcgtatgataatgaacaattgcgaaagttattatcagagcaaataagcaagttagataaaaagatttctgacttacaattaattagacgctctgtatgtgaatttattaaaggactctctctaatagataccagcattttaaacaagacactacagtcacaatatgataaagaagcatctataaaatatggtcatacgaaagcatatcaatcatttattagacgtaaagacagcttacaatcgcaggatatcagacataaattgacaactatcttcaataaatttaatcatatgtctttgagtcattatccaatccaagattgtagtgatctcgtatttgagtggaaggcatttatgaacactatcgctgattttgatgatgaaacattatgctgtattgctaaaacatatgaagatgatacgcgtttcaaagattactttaattcatatgataatcaaaatttagcatcatacatttcagaagctgttaattattttttgagcaatgtgaataagagcgacaatttttaatcctcatacagatgctacaacactgaatacaccaactaaaataattgttcaaagtagaaaactaatcatttattctctaaatcaataactatattaaaagttatacctttgcaaagcgaattagtataggttaccgaaaggagaaaggattaggttccattcgatttataaaaaaatatatttcgaaacatacaaaagcgccagaagataatcatttcctctcgcgcttttatactgaattatattaatttcaaactctaaaactctaataatttctttttcaatgcatattcaactagctcaggtttactctttaagccaagctttgtcataatatgcgtcttatgtgcttctactgttttcacagatacaaataatttctctgcaatttctttattcccgtaacctttggcaataagtggcaatatttctagttctcgttttgataagattttaaaaggatctgttgtgtttgcagtgtcctgatttgaattagatacaaattcattcactaaagatgttgtaagtttcatatctacatatgtttcacctttatatacagttcgaatagctaacaataattgttcatcaggtgcatttttcaatatgtaacctttcgcaccattacgcaacacatggaacaaatactcctcatcatcaaacattgttaatattagtattttagtttcaggaaaactgtcagcaattttactcgtagcgataagacctgactcacctggtggcatacttaaatccattagtaacacatcaggtttatattccattactttttggtaagcttcgacgccatctgcagccgttgcaacaacttccatatcattttgataatttaaaatcatagagaaccccgtacggacaacagcgtgatcatcggcaatgactattttcaattttattcccccaatgtatgtttcaaattggaatgttcaatgtaacattggtaccctcaccaattttcgtttcaatattgacgctaccgctgactaactcagctcgctcattcattccatataaaccgagtccagaacctttaggcttagaacttggatcaaaaccatttcccgcatctatcacttctgctaccaaatggcgcccagtttgacggatacctacatttatttcatttacatcagcgtatttcaacgcatttaaaatagcttcttgcactactcgataaacaaccgtttcaatatcactatcaaagcgagtatttttaatatttgatgtatatatgatttttattccataattttcttcaaactgtttaaaatatgatttaaaagctgcttcaaggcctagatcatccaaagaagcgggtcttaattcaaccgacatattacgtatatcatcaattaatttagcgacaatatattcaatattttctgcgtcttccaaaagcttagttgtatcttcttgatattttaataatctcaattgaacatctacattgagcatttcttgaatcacactatcatgtaactctctagaaattcgctttctttcattttcttgggctgagattgttttacgcatcatacgttgttgatgcaatttctcttgctgttcaatttgtgatgaaacattttgaagcgtaaatgcatgaattcccctgtcttgatcaatcaactgatatgttgctgtaaatggcatcactttttgatctttcgtcttcataaatacttggaaattcgtagcttgtacttgcatcgattctaagaaacagtctttacatgattgtacatcataggcatttgtatacccttcacatctgtgacaaatcgcattcgccacagcactgtaattatcttcttcagataatatatctttagcagcatcattcattgcaataattttaccgttatcatcagcaaaaactatcttttcgattgaatgctcataatattttttcaataaagtatctaactgtatactgtcctcattaatcatgacttacaccctaattcatctcattatttatcatcattgaaaataccaaacttacgttgaatatcatcattatcaaatatttttggtaaaggacgaccatctctttgaccaaataatagtacgccatacacttgattcttataccaaagcggcactgctaaaactgctgttaatgattcgctcaataaaattggatagtcaatcttttcttcaggccctaaagctaaaccaacattggctattaccatacgctttcctgttttcataacagttccagctaatccacgaccttttcttaaaataatcaatttaaatcgattatttttattacctgaaacatagtgccattttattggagatgatggtttgttagattcatagaaagcgattgccgcaaaatcataaccctcttctttgcgtattttatctaatgtctcttgaaatctacgatcttcaattattgcttctggtgtcaaatcctttcacctcttatgcttacactttattcttacggtaaataatatatctgcgatttatatatgtcaaaggtacactccaaacatgcaccaaacgtgtaaatggccaacaagccataatagtgaaacctaacaatatatgcattttaaatgcaatcggcacaccactcatcaatgacgcatctggttttaacataaataattgtctaaaccaaattgataatgaagttctgtagttaaagtctggatgttgtatatttgttactaatgttgcgtaacatcccataaatacgataagtaataataagaaatttacaaatatatccgacgctgaacttaatcttcgaatacttttcgtagtaacacgtctcgctgttaataaaaacatccctatcaaagttattataccaaagatgctaccaatataaacagcgcctatatgatataaatgctcagacacacccactgcatccatccatggtttcggtattaacaatccaactacgtgtccaaaaaacactggaataatacctaagtgaaataataaacttccccacatcaacctttttctttctattaattcactagatttagctgtccaagaaaatttatcataacgataacgtgcaatatgacctgcgacaaagacaactaaacataaatacggaaatataacccataaaaactgattaagcatgatgtttcactccttttggtgatgtcaaacataatttcaatgtttttctaagtgcttgaatcacataggcatatggattgttatcttcaccaagtgcattcgccatcacatatgttccatcctcaataatcataatgattaattgaatattctcttcagctcttggatcatttcgccattctgccacttgcaaaaattgaagcatcaacggtagataatcagaaagttcattatctaccatttctagtccaaacatttcatataatacctttaatttagctaacatttgcccacgttctttttgcgtatcaaatttgttatacgtcatatataatggtgcttttttcgtaaaatcaaatgtatctgtataaatcgctttgatttctgataatgaaaatgtcatcattacatttctaaatgctactaaatcttcatatgctggatgatctttcgaaattgtttcttcaaaagtttttggatgaaaagttaatttttctggaaaacataactgttgtgccatatatccaaaactttcttgatattttttaaaattatcgaaattaatcacggaaaatccctccatagaaattctcattataaatttcttgaccagttttccctgaacctactgcaacgccacagccttcacagttatctccaaaatgctcgccgccgtaattgtatcctgtactaccttgtgcgtgatacgtatctaaataggtttctttgtgtgatgttggaataacaaatcgatcttcatatttggctagtcctaataaacgatacatgtctttagtttggcgctcggttatacctaatcgctctaatcgagacgtgtcaaatggctgttgagtaacttgagatctcatataacttctcatcattgccatacgttgtagggctccttttactggctctgtatctcctgcagtgaaaatattagctaagtattcaataggtaaacgcatttcttcaatggctgggaaaatcgcatctggattttgagttgtatttttaccttcaaaatagctcataattgggctaagtggtgggcaataccaaaccatcggcatcgttctaaattcaggatgtaacggaaatgcaagtttatattcaattgctaacttataaattggagagttttgtgcagcttcaatccaatcgtaaccaataccatctttttcagcttgagcaatgacttcttcgtcaaatgggtttaagaatatatctaattgtttttcatataaatctttctcgtctactgctgaagctgcttcatgaactcgatctgcatcatataataaaacacctaagtaacgcatacgtcctgtacaagtttcagagcataccgtaggcatacccgcctcgattctcgggaaacagaaagtacacttttcagctttgttcgttttccaattgaagtaaactttcttatatggacaacctgtcatacagtaacgccatccacgacatgcgtcttggtcaactaatacaatgccatcttcatcacgtttatacatagcacctgaaggacacgatgcaacgcaacttggattcaagcaatgttcacataaacgtggtaaatacatcataaaagtttcgtcaaattggaatttaatatcttcttctattttttggatgttaggatcttttggacctgtaacatgaccacctgctaagtcatcttcccagttaggtccccattcaatttcaatgttatcccccgtaatttctgaatacgctctagcaactggcgaatgcttccctgatttcgcagttgttaaatgttcataattatagttccatggctcataataatctttaattaatggcatatctgggttataaaaaattttacctaaagcaatttttgaaattctacttccagattttaattcaagtttccctttacgatttagtacccaaccacctttgtagtgttcttggtcttcccaacgtttcggataccctacacctggcttcgtttctacgttgttgaaccacatgtactcagcacctggacgatttgtccaagtgtttttacatgtcacactacacgtatggcatcctatgcatttatctaaatttaataccatcgcaacttgcgctttaatcttcaagccaattaacctccttcatctttctaactgctacatataaatccctttggttcccaattggtccataataattaaagtgataactaatttgtgcgtatcctccgactagttgtgttggtttcaaatggattctagtcggcgcgttgtgtgaaccaccacgtgtatctgtaatttctgacccaggcgtttgaatatgtttatcttgtgcatgatacataaacattgtacctttaggcatacgatgcgaaataactgctcttgccgttacaacaccattacggttatacacttctagccaatcattatcttggatatcgtgtttttcagcatcttcatttgatatccaaaccgttggaccacctctaaatagtgtcaacatatgcttattatcttgatacattgagtgtatattccattttccatgaggcgttaaataacgcagtaccaaagcatctgtaccacctttaattttcttatctctattcccaaataccattggcggcaatgtcggtttatatactggtaagctctccccaaattgttggaaaacttcgtgatccacataataactttgacgtcctgttaatgttctaaaaggtactagacgttctatattcgttgtaaatggtgaatatcgtcgaccttgtttatttgaacctgggaatactgctgtcggtattacttctcgtggttgtgaagttatatttaaaaacgaaattttctcagcagcgcgttcgctagaaatatcttttaacggcattccagtttgttcttcgagatcttcatatgatttttgtgataatttaccattcgtagcagatgaaatacttagtattgcatcagctacattacgtgctgtatcaatacgtggacgattcgctctcacagaatcatcatttgtatcactccacgtacctaacatactttttaattcttcatattgttcactgacaccgaaacttacaccatgtgctccaactttccctttttcaagtacaggaccaagcgtgacatatttgtcgtaaattttagtgtagtcgcgttctacaattgcaaagttaggcattgtacgtccaggtaccgcttcaatttcacccttcgaccaatctttcactacgccgtatggtgttgaaatttcttgctttgtatcatgactaagtggagttgtcacaacatctttaaacgttccaggtaaatagtcttttgccatttctgaaaatgcttttgccaacgttttataaatatcccagtctgaacgcgattcccataacggatcaatggcaggattgaaaggatgtacatatggatgcatatccgttgatgataaatcatgtttttcataccaagtcgctgccggcaaaacaatgtcagaatataacggtgttgccgtcattctgaagtctaaagagaccactaaatctaacttacctgttgtttcttcacgccacgtaatttcttctggcttttcatcttcatttggtgtagctaataaccctgattttgtgccaagtaaatgcttcataaagtattcttgaccttttgcagaacttgaaattaagtttgaacgccatataaataatgattttggatgattctttttcaaatcaggatcttctattgcaaattgtgtttgttttgatttcacttcatcaattgcacgttgcaaaatcgcttcatttgaatctataccttcatctttagcttcttctgcaaacaacaaactatttttattaaattgtggatatgatggtaaccaaccaagtctagctgctaaaacattataatcagctggatgttgatgctttaactcctctgttttagctaatggagattttaaacgatctacatttgactcttcatatttccattggtctgttgcaaaatagaaccaacttgttccgttttgcaaacgtggtggtccttgccagtctttcgcaaatgcgacagtactccatccttcaatcggacgacatttttcttgtcccacatagtgagcccaaccgccaccgttcacaccttgacagccacataacataactaagtttaagattgaacgataaatcgtatctgagttaaaccaatggttaatacccgcacccatgataatcattgaacgcccttcagtatcgatagcgttttgcgcaaattctttcgctacttgaatgacaacactttgttttacgcctgaaatggcttcttgccaagcaggtgtatattttgattctgcatcgtcgtatccttttgattctaatttatgatcaaaacgacgcacgccatattgacttgccattaagtcaaaaattgtagcaatacggactttgtcaccatttgctaaagtgacttgtcgagttggaattggacgattgaatatcccatctccatcactatcaaagtatgggaattgaattgtttctaattcgtatccaccttctgtcattgataatgtagggttaattttagaaccatcttctgtttctagttttaagttccacttcttaccttcttcccaacgttgacccattgtgccattaggtactactaaactatcgctgattgcatcatgaataactggcttccattcgccttgctctgttgtttgacctaagtcactcgctcttaaaaatcgacccgctttatatccattttcatcttcatccagcatgataagaaacggcatatctgtatattgtttagcgtaatttataaagcgttcattaggttgattaacataatgttcttgtaaaataacatgcgtcattgcttgtgcaattgcagcatctgaaccaggattcggtgctagccagttatctgcaaatttcacattttctgcgtaatctggtgctactgaaatgacttttgtacctttatagcggacttcagtcataaaatgtgcatccggagtacgtgttaaaggtacattagagccccacataataatgtatgatgcgttataccagtcacttgattcaggcacatctgtttgctctccccaaatttgtggagaggcaggtggtaaatctgcataccagtcataaaaactaagcatttcaccaccaagcaaattgatgaatcgagcacctgctgcataactaatcattgacatcgctggaataggtgtaaatcctgcgattcgatctggaccatatttttttattgtatacagtaattgtgctgcgattatctctgtaacgtctttccaatttgaacgcacgtgccctcccatacctcgggcttgcttatattgtttggctttgtcttcattttcaacaatagacgcccatgcagcaacgcgattaccattgttttcttctaatgcttcagtccataaatcccagagttttccacgaatatatggatatttgattcgaagcggactgtattcataccaagagaatgacgcacctcgtggacatcctctcggttcatattcaggcatatccggaccacaacttggatagtcagtttgttgattttcccaggtaatcacaccatttttcacaaatactttccaagaacatgagcctgtacagttaacaccatgtgttgttcttacttctttatcgtggctccaacgttctctgtacattttttcccattctctacttttactttctaggatcgaccaattcccattaaatttttctgttggcttaaagaaattcaatccaaattttcccatatttatatcctcctacgtataaaaatacgatgtgtagatgtcgtgtttttaaatactttaaaatgcccaagactattgctttaattagattgtacattttttcacaaacataaaatattagggaatcacctaattacttaaggaatttccctatcaataacgggatttcattgaaataatacacaatcatgtatggtcatgcttattgccaatctaaatcgttcaaatttggcacaacgacaaataaggcttcaacacgaatatattctctcggttgaaaccttacttattcatttattttttataaattagtgacataacactgtattagcatctgcacgatcggttgaaatatatgttacattttcttgctgcttaataaatgcatcatagtaatcatattgcgacgaatgatatgtgccattcgatgtatcatttgggtttagcaaacagccataaccttcgtcatataaatgttcacagagcataagggcgtcatgtttagaaccacttactacataaaattgcttcataggatcatatgatttaggagtgttttcagtataatcaacaacttcccctataatacatatacctggtttcgcctcaattgaatagtgttgcaattttgaaataatattacttaaacgccccttaacaacaaactcgttaaaacacgatgcttgaaagacaatcgctatcgggtaatcaatatctgtgtattgttgtatctgtgtgataattttccctaaacgttttacccccatataaattgctaacgtgccaccattcactaaggaattgacatccacttcattttcttctgaatctttaaagtgacctgtagaaaatgtcacacttttagcaactgtacgcattgtcaaacctgtctgcatagtagcaactgctgcgctcgctgatgtcacccctggtacaatttcaaacgcaatatgatgttcatttagtgtgtcgacttcttcttgcacacgaccaaatatcgctggatcgccacctttaagtctaacaaccttgttatatcgacgcgctgcttccacgatacagtcatttattttttcttgctgaatatgttttgtatacggctttttaccaacatcgataatttcagtagtcaaattcgcatattgtaaaattaacggattcactaatcgatcatatagaatgacatccgcttcacgtattaaacgctcagcctttttcgtcaaataattcggattacctggacccgcacctatcaagtaaaccttgccatattcctctacagacatatatatacgttcccgtctgtaacttctacctcataaacatctacacaaccttcatcaggttcttgaacaatacctgtatttaaatcaattttttgatcgtggagcgggcaaaatacatattccccactcactgtcccttcagacaatggtccttgtttgtgtggacagatattgtgaatcgcatgaattttgccactttctgttaaaaacaaccctacctctttgcctttgacaataaccttttttccaattaggggtgttaattcatctatagttgtcactttaattttttcttttgtttccatgtattacaccttctccacttcaaaaattctacgtgcttgcgcattgctagttattgcttcccaaggttcagcttcgactgcttttttagcatccataatgcgttcaaatagttcattttgtctttctgggtcaagtaagacttcttttacattttcaaatccaagtcttcttaaccatggcgctgttctttcagcatatatacctgtttcgcgataatattgcatcaaagcaccacataatttgattacttcatcttctgtttctacagttgttaaaaattcagctttttcaacttctgtaccaccattaccaccgatatagatttggaatccattttcaactgagataataccaaaatctttaacacctgattcaacacaacttcttgggcagcctgatacacccattttgaatttatgaggtgtatcgatgtattcaaatgttttttctaaacgaatgccaagtcgtgtcgtgtattgcgtaccaaatcgacaaaactctttaccaacacagcttttaactgagcgtgttttcttaccataagctgatgctgaacgcatacctaggtcttcccatatatttggtaattcttcttttttaactccatacaaaccaacacgttgtgaacctgtcactttaactagtggcacatgatatttcttagccacttctcctagacgaatcagttggtctgcatctgtaacacccccacgcatttgaggtataacagaaaatgtaccatcattttgaatattcgcatggtaacgttcgttagcaaatcttgattctctttcatcttcatgatcatgtggataaaccatgtttaaataatagttgattgctggtcgacattttggacatccacctttatttttaaagtttaaaacatgtcgaacttctttagatgtttttaaacctttcgctcttatttgcgttactatttgatcgcgtgtcaaatcagtacaaccacatataccagcaggttttgcggcaacaaagtcatctcctaaggtgtgctgcaatatttgagcaatttgcggtttacatttaccacatgaattccccgcttttgttttagccgttacttcttcaactgttgtaaagccattttccgtaatcgcatttactatagtacctttatcaacaccattacaaccacaaattgtttcatcatcagccatatcagcaattgatagcgatgcctcttctccacctttagtaagcaatgatacaagtgtgtaatcttcagtggattcaccttttttcatcatgttataaaagcgtgaaccatcatcgatatcaccatatagtactgcaccaactacattaccgtcttttaaaaagatttttttatagttattatcaacactattaaatatttcaatacctttaatttctgcattttctacaatttgaccagcactatacaagtcacacccagaaacttttaatgacgtaaatgttgttgatcccttgtatccgttcgtttctttatttgttaaatgatcagctaatactttaccttgttcatatagtggtgcaacgagtccataaactttgccgttatgttctgcacattcaccaactgcatatacattgctatcacttgtttgcatcacatcattgacaacaataccacgattaacatctagacctgattctttggctacttctgtgtatggtcgtatacctactgccataacaactaagtctgccggaatctcgcgtccatcagccaatttaacaccctcaacatcatcttctcctaagatttcagttgtgttggcttgcatttcaaacttcataccttgcttttctagatctgctttaagcatatttccagctttacggtctagttgcatttccatcaaccattcagctaaatgtaacaccgttacttccataccttgatctaataaaccacgtgcacactctaaacctagtaatcctccaccaattacaattgctttctttttagtcttagcaatgttcatcatttgttcagtatcatcaatcgttctccaaccaattacactcggtaatgtcgaacctggaactggaatgacgaatgctttagaacctgtcgcaaaaatcaatttatcgtatgatacttcaataccatttgcagtagtaactgattgatttgctctatctacttcaattacaggatcatttgtaattaactcgataccatgttcctcataccactcatatggattcataattgtttcttcaactgtcattttattttgtaaaatatttgaaagcatgatgcggttatagtttggataaggttctttacctattaccgtaatatcatataaatcgttggcgcgctctaatatttcttcgattgttcgaatgcccgccataccgttaccaatcattactagtttttgctttgccataaaatatgcccctttactccataatatttatttcaaaaaaaggtattaatttttcgttagtgcttttatattttcattggaatcattaagctttctaatctatcgttaatgatttgctttaaaattgggtcgaagttaattgaaggtgtgaagtgtatatctgtattaataaccatgtcattcatttgctgcttcactttgttaacaagtcttccgtcatataaaaataatggtacgacaatcaatttttgataccgtttcgagatgctttctaaatcatgtgtaaaactaatctctccatatagcgttctcgcatatgtcggcttgctaatttgcaaattttgagcgcatatttgtaactcttcgtgtgccttagtaaactttccattaatattgccgtgtgcaacaaccataactccaacttgttgttcgtcacctgctaatgcgtcacaaatacgttgttcaattaatcgtctcattaaaggatgtgtgccaagtggctcgcttacttctacctttatgtctggataccgtcgtttcatttcatgaacgatattcggtatatccttgagataatgcattgcactaaagattagcaatggtacaattttaaaatggtcaaccccactttgaatcaacgtcgtcattaccgtctctaaatcctgatgctcactttctaaaaacgcaatatcatagtgatgtatatcatcttttactaattcagaaataaatgcttctaacgcttgattctgtcgtccgtgcctcatgccatgtgcaacaatgatattcccattcacatttaccaaccctttcacacgtattgtataccaaatcattttgtttttgtgaaaagaatcacattataatgtaaaatcagggaattccctgatgcctgtagtcatgcatattccttatacattttccctttttgttaaatcaaaaaaagcgaccgatatatgaatccctactcaacatttatttgagcaagcattaatatatcggtcgcttgtagtgtatattattatcttaaaatggtggttggcctaatattgtttcgtcaaagcgctcgggtatcaatactttgcgcatgatcacacctaaatcgccatcatcattttcatgttcgctgtatatttcataacctcttttttcataaattttaagtaaccacggatgcaatcttgcagatgtacctaaagtaactgccgctgactttaacgtatctcgcaaaaatgcttcttcaacataagtaagtaattggctaccatagcctttcccttcatactcaggatttgtcgcaaaccaccagacaaaaggataacccgaaatacttttcacacttccccaaggatatctaaccgtaatcgtagatataatttcatcatcaattgtcatgacaaatgtagtatttttatctatattttctttaacagcatctaaattagcattaaccgaaggccaatcaatacctagttctcttagaggcgtaaatgcttcatgcatgagttgttgcaatttttctgcatcttgttcacttgcgagtcgaatcatcgtttttgtcatattaatccccactcttttttaaatgatttaaccatattttatttttaaaataaatatccatcaaagtgtatcaataaatttatcacatgtcagaaagtatgcttcatctgaatacaccaatactctcatgaaacttattaaaaattactctctcaacgtaaaaaaccattcaaattcatgaatggtttggaagaatgattcattgttacgctatttaatcactacatcttaattattgttgctctaaacgattacgcttaccatttaagaaagcataaacgagacctacaaaaataccgccaccgacaaagttacctaagaaagcaaaaacgatattttttaaaacgtgtaaccatgaaactgcatcaaggttaaagaataccatacctgcatatagacctgcattgaacacaacgtgctcatatcccatgtatacaaagaccacgacaccacaagctatgaagaatgcctttgttaagccgcctttgaattgcatagagatgaaaataccaatattaataaagaagttacagaaaataccttttgtaaaaatattcaaccatgttgaatcaacagtctttttctgaactaaagctgttaaagcttgtgtcatttcaggtgtcatgacatgcgcaaatttcattaagaaaaataacacaaacccacctaaaatatttcctaagaaacaatataataaaatccaagtcatcttcttaacagaaacgactttataataccagcctactgtaaagtacatgaagttacttgttaataattcagagttagttaatacaactaaaatcaaacctaaactaaacgcaatggctcccattaaattgataagtccatctacgtgagtactcgcaaactgcgtctttattccgaacataaatacagtaacgattgagagtaaaaatccggccatcattgctttaagcatatatcggccaggtgtttgctgtaccattacttgcttcatttgtactgaagatgatattgaatcaacaattgcgcctgttgaatatgtatcttcaactgttttcttattttctatcacagtacttcccccatttactttgatcaaataaaatttactttctaattatattagtaaatcaatgtaattgatagattaaatttcagaaaaatctttttattctctcgaaaatgtagttttctttcataaaaacagcgagataaatcgcgtgattggctaatatctttatgatttaagatattacgacgctcattttatctcgctttatgtaaagtattacttattcttttttaaatttgaaaagtaatgtaaaccatatgcaaatacactgtaaccaattgcagtacgtaaaataaaccttataactttattaggtacacattttgacgttactgaaatagaagatagtagtgttgtgaaaatatataatattaaaactttgatataacgttctaccatcgaatcatccctcatttttataatattacaagattattataaaccgaatgaaacaaaaaagtttttacatattttcaacaactttatttcaataaagcatcaagttgatctaaagtttgattcataccttgttcaacacccatgtttatgacttgttgagcggcttcttttgttggaaataccgatgttgatgtcactgtcgttttcgttgtattgctcttggaaaatgacaaagtaattttcatgcttggcatttttgtatcttttgcaccttgaggtgtcgcaaatgagtcaatatattcaattaaatatggacgcttaaccgttttatattctgctaatgtatagctggtcattgtaggtgttttaatcgcataaaatgcatcaccgcctgaaacagcattaaagcgaaacactttggtactagcgtcttttggatgaaaccatttttcaaataatgcttttgtcgtataggcatcaaacaccttttcaatcggtgcttctatcgttcttgaaaaaataattttattatcttcaactttaatcgtcatcttcccactccctatcttttatatttactcatcttaacatgcattgagtaacatatgttaccaaatcatttgttataaactatagtaatattaatcattccctctgttgaaattgataactacgaaataaaaaacacactctattcagctattaacagttgagtagagtgtgcaaacctgttgaattaatgcgctaacatttcttctttgatttggtctttatttaattttgaaggataatatgttggccagttatccatttcttttaataacgcgtcattatcattacccataaagatatggaagtgttctgcctttttaggtgcaatgttgtgatcgctaaattggatgaatttcggtaagtctttatcattaccatcgaccaatttaaacataaatctcacgccacggttacctttaggatatttcaatgttttcttaccattgtattcatatttaccagtgtgtttcttaccatctttagtaaatgtaatttcatttccttttatatcaatgttagtaatatcagttttatatcctttgtcataataagcttttaaatctttagcagatttcttcggatcattttcagctttatgttccatcacttcatcaagcgtaccgtcttttaagtaagggtaaacagattgccattcaccagcataatcgcttaattcacggtctttaacttgctcatctttaaaatacccatcagaaattgctttgtcatgtttactttcagctttgtcgtctttcactttaacaccactgtctaaagctttaccgatattttcaatattagatttcattaatgattgatacgtaatattatcttttttctgttgttctttatttaaagactccatgttgtagaattttaaaggcttcgcatctgtttctttacgaattgtttcagtcactttattcgcaacattatcttcgtaaagaatatatttagcattgctatctctaatttctttaacaattttagttaattctttttgtgatggatcttcagcattcatgttttgaatacctttttgaacaaaaccataacaatcagctaagtatccaattgattcatgtgaaatgaatactgcattaccttgcttatcttttgtaacttgcttcatatcgttatcaattttcttaagatcgtcgtttaattttttgtagtttttctcatagtcatctttatgttttggatcttttttcactaattcatctttaatttctttagcgaaagtttggttaattttaggatctaaccatacgtgtggatcatatccaccatgatgatgatgatgttcttctttctcatgatcatgtccctcatgttcatgctcttcaccatgctcgtgttgatcagttaaaagctttgctttatctaatttatcctctaaagacagttttttatctttatctttgatagtagatgcaactttcttagcaaccggatctaaattatcccctgtatacataaacaagtctgacttgcttgcacttaatatatctttttgtgttggttcatagctatgtaaatctgtccctgctggatagattgatgataccttcacgtgttttccaccaatttgctctgcaaatgattgcaatggataaactgtcgttttaattgttaccttgccatctttatcttttccatcatcattcccacatgcggctaatgataaagttacggctggtacaagaagtaacatacctaatttctttttcatagtcaccctcctaaatagtaatctttacgttttaaaattatatactcatgctacttaaaatacaagcactgtttttataaataatataaagtcgaatcatactttaggtatttaccacttttcgttttatctaatacatgactattgtacaaatatgatacagaaaactttatagtatttacgaacgtcataatataagaaaaaaagacaatctctatcatattgctaatagaaattgccttttcatattgtcctaaaataacttaccctatttttatagtgtgacttttagatttaataatggtatttacatgatgctatttttatatgattgtcatctactgtataaaccaatctatgttcgtgattgatacgtctactataatacccagtcagattcgattttaacttttcaggcttacctataccttccaatgcaccatttctgtcaatacttttaagtaactcattaatcttcttcaccatttttttatcgttctgctgaaaatacttataatcttcaaaggcttgaggcgaaaacgtaatatttaacctagccattatacatctatatctttcgttatagttttcccacgttctagatctgcaattgattgagctaagtgttcagcattatttgggttctgttggaggtaaagtgtttccatcatggagttataatctgattctgacatgattactacgtttttatcatcagtagatgttacagttaccatatcactatcatcatttacttttgtcataagtgcctttaaattctgtcgagcgtatgaataatttttaataatcatatttatcgcctccttttaacacacctcaattgtacaaatatctgtacaataaaacaagcgacacagaaaaaaactactaatcaagatttcgcacggggaagaatcaatacctatcctgtactgattccctactaaacaatgtttacatgataatttccacctatttagacttcatacattaaaaagacaatctctatcatatcgctaatagaaattgccttttcgtattgtcctaataaattggtatcacttactgatctcaacaattaagactatttgattttatcttttaataacttctcataactttcataatcatatggatcttcaactttctcgccattaataaatgcagttggtgtcgtttttatatgattatctttcgctatttttttatctttctctgcagctttccaagacttgctatcttttgtcttgtaatcttttataattttattttccgtctctttatctaaatgcagttgtttaatatgtttatctaatagttcttttgttaaccattctttattttcatcttgctgggcagcaaataattgcttttgaaaatctaaaaatgatttaggtgcatacatcaatactgcatgactcgcacgcgaaccaacaattgagtctttacctaagaaagctaaattgacaaattggtattccactttgtgattatctatataatttttacgcaactttggcatgactttttcatctaattctttacaataaggacatttatagtcgccatatacgacaactaatggtttgccgtttttcgaagatgtcgttgctgattcttttttaccgcaagctgttaaaattaacatgctcactataaataatgttagtaattttttagtcataataactcctattcatatctagttcgtcatattttcttcatgataatccgcatcatgttgttgataatatcgtctcgaatcaaaatcttgcttatatgatacacgtttatcactaaaatcatatgcataataatgcacttcatcatcattactcaaaggtttataagctaaaatgataattttatccttatcatagacataaatattagcatctttgcgttcaaaatgatcaacacgatcaccgttgccttttttggcaagttgttcttgtttttgattttgaattttaactgcttcatctatttctttcacatatttatcattaccacatcctgatataaagactagtaataataataccgtcgccacaaatcgcttcaatgctcccactcctactatcaacttccaactaactttcaatataattaatactatacaccgtcaaacattaatgcgctacaactactaccaatgcatttaatataaatatccaaagaaataacagttatgtatagtcaaagaaaaatatatttcattttctatgtgtatttgtaatcagtttttgataaaataaaaaaatagcattattaataaattcaaaaattatagttcaattcagagagggatgggataaaatgaactttgtaacgttgacttcggatgagttcaatgcgtttacaacaaagcatttttcacattacacacaatcagctattcattacaatcatagagttgatttaaaaggcgatgtgcatcttgtaggggttaaagatgacaatggtcaagtgattgcaggatgcttattgacagaagcacgcacacttaaatttttcaaatatttttatacacatcgcgggccagtgatggattatacaaatcaatcattagtagcatttttctttaaagcattaacgtcatatttaaagaaacacaattgtttatatgtccttgtagatccatatttaattgaaaatttacgcaatgcagacggtgaaattgttaaatcttatgataaccgagcatttgttagaacaatggataaattaggttataaacaccaaggtttccctgtaggttatgattcaatgagccaaatccgttggctgtcagtgttagatttaaaagataagactgaagaccaacttttaaaagaaatggattatcaaacgagacgtaatattaaaaaaacatatgatattggtgtcaaaactaaaacgttaacgattgatgaaacgcaaacttttttcgacttattccatatggctgaggaaaagcacggtttcaaattccgtgagttaccatactttgaagaaatgcaaaagttatacgatgaccacgccatgttaaagttggcgtatattgatttaaacgagtatttaaaaacgttacaattaaagcaacaacaattaacagctgaactctcaggtgttgaagaagcattggaagaaagtcctaattcaaagaaaaataaaacgaaacgcacacagctagaacaacagctaaatagcaataagcgtaaaatcgacaatacaatagaacaaattgaacaagatggtgcagtcttaaacttagcttctgctttatttatctacaatgagcatgaagtttattacttatctagtggttcaaaccctaaatataatgcttatatgggtgcctaccatttgcagtgggaaatgattaagtttgctaaagcgcatcatattgatcgctataatttttatggtattaccggtgacttttcagagtcatcagaagactatggcgtccaacaattcaaaaaaggttttaacgcacatgtagaagagtatatcggtgactttattaagcctatcaaaccattactatataaggtacaaacgtacttaaatcataaacgtcgttaaaatatcgctccaagattatgacaacataacaaagaaccacgcatcatgtatatggcttcatcgccatactaaaacatgatacgtggttctatttgattattcttcatttataacatttaagaaacgtcttaattcttctgttttcggacgattgaacatctcttctggagccccttgttctccgatcatgccttcatgaataaatacaatgttattagatacttctttagcaaaacgcatttcatgtgtcacaatgaccattgtcatgccttcattagccaaatctttaataacctttaaaacatcattcacaagttcaggatcaagtgcagatgttggttcatcaaacaacatcactttagggttcattgctagtgctcttgcaatagcaacacgttgttgttgaccacctgataatgcatgtggacgttgatctttgacatgtgttaaaccaactttctcaagtaactcaagtgatttcccacgtgcctcatcctttttcaactttttaactgtgataagaccttccattacattttctaatgccgtcttatgcggaaaaaggttataactttgaaataccataccagactgtttacgaacttctatttgtgattttttatctttagatgtatatgttttgccgttaacataaactgtaccttcagttggaatttctaatgcattaatcatacgtaacaatgttgttttacctgaaccagatcgaccgattaaggttacaacctcaccttgttcaacagataaatcaatacctttgatgacttcaacatcattaaatgatttatggatattgttcaattgaatcatgagcgataccctctttcaatataagattcatagataccttggataattgaaataataaagcataccacccagtacattagcgcaactaacacataaattgttaaatattcatatgttgtagacgcaacttcttgagcttttctaaacatttcagccactaaaataaatcctaataatgatgtatctttgattaaacttaaaaatgtattacctagtgcaggaatcgacactcgaattgcctgcggtaaaatgatacgttgtatcgtttgaccatacgtcataccgatggaatatgcagcttctgtttgtcctttcggtatagaaataataccgccacgaataatttccgaagcatacgcacctacatttaatgataaaccaataatagcagccactacaggtgccaatgtccattggttgtcagcgtcatttgttaataatctacctaattctggaataccataaaatatgataaatagttgtactatcattggtgttcctcgaataatagatacatagacacgtgaaatacttcttaaaattttactcgttgaaattcgcattaatgctgtaaataatgcaataatcaatcctaaaacaaatgtaactaatgtaataggaattgaatatttgaccaaaccttctagcataggtccgaaagcttgttttgcagcatctagcgcatgttgttgttcgctatttagatttagaaacatcttgaccaaaccatttcttacctattttagctaattcaccgttttcctcgatttttttcaagccatcattgaatttttgaactgtttcatcatctgcttttttagaaaatgcaaatgcagatctactttgttcagcattacctttgattgctttgatcttagcattaggtttttgttttttataatccaagtatgacagactatcattaaatgtaccatcaacacgcttagacaataataaatccattgattggttaaagccatcaacttttgtaatatcagcacctttatccttagctaatttaccataattagatgtgaatgtttgtgctaacttcttacctttaacatcatcaaaatctttaatatctttttcattttcacgaataactaaaacagcacttgagaatgtgtaaggcttagaaaatttatatttcttttctctatcaggattaatacctacttggttcgcgattacatcaaaacgccctgcgtctaaacctgcaaacatagaatcccaagaagtttcattaaatttaagttttaaaccttcttctttagccactgctttaataacatcaatatcgtaaccagttaatttaccatctttatcgtggaaactaaatggtgcataagtcccctcagtcccaacattaattgtcttgctatctttactagcttccttgtctttcgacgaattgtttccgcatgcagccaatatgaaaacgaaagctatcatcacaaataaaagtcttttcatagaatatatctccttattcttattattctaatcggaataaaaatattttaatctgaaatgccggataagtcaatatgttgaacttttgctaaaaagctttatatagctagcaacttatatttattgacgagaatcaacttcttttttcttaccttgtaacataaatgaacaaaagaaactaacaactgtaatcaataatgcaaataaaaatccagcgtgataaccatgcaacatcgtatcaactttaatttgattcatcatatcaattttgttcatgccattatagtctgacatagttggagaaaagtttttgcttgcatgggataaaatagtaattaatgcagctgttccgatagaaccagcaatttgttgtactgtgtttgtcatagatgaaccatgtgcattcatttctggctttaattgattcatcgtatgggtcattactggaattaatcctaacgcgataccaaccattcgaatcgcataaactgttgccaacatgattgttgatgtttgttcatccattacaacaaaataagccgtagtaataacaacaatcgccatacctactaaagcaagatttctaggaccaaacttttcatataaagcacccgaagtcatcgacataaatgccataacaattgctcctggtaataaagttaatccagaatctaaagctgaacgatgcaataaattttgcacaaagataggtaaaatcgtttccgaaccaatcatcgataccattgtgacacccataataatgataccaactgtaaattgtttatttttaaatacagcaaaatttaataatggtgttgatagccgatattgacgtaatacaaataatgcgactaaaacaacgcctccaatcatagatactaatacgataggattatcaaaacctttttctgaaattgaactcgttccatacaataacccgccgaaacctagtacagaaaaaatgacagaaataaaatcaataggtactttaattgtagttccaacattttttatcgttttaaatccaattaaaaatgtcacagctgcaattggagcgacaacatggaaaagcgatctccagttaaaatattcaacaaggtaacctgaaagagtaggtccaatagctggtgctaaaccaattaccaaaccaaatatccccatatatttaccgcgttcatgtggttggaaaacatccaaaatcgttgtcatcatcaatggcatcataatacctgcgcctaacgcctgaataattctagcaactaataatgttgcaaagtgcggactcaagccgctgagtaatgtacctaagaaaaagatagaaatacccactaaaaacacttgtcttgttgtataacgttgtataacaagcgcggacaaaggaataacaatcccattagtcaataaaaaagctgttgtcagccattgaacttgtgtatatgaaatttcaaaatctttcataatacttggtaaagccgtcactaatagtgtttcatttaataatccaaaaaatccacccatcagcatagtaataatcatcgttaatttttgtttcttcgacatttaaagcttccccctcaccatctaaaaaacgacacacatttttagatatccggtaattatacccattttccaaaaaattagcacgactttattacaatttctttaaaacgtaatcattactatttacatatgagtagttatcggtcataatatatttacaaggagggatagagatgaaattagatttacagactgctcgtcgtaatttaaatagccctaacattaaaacaagaaagcgtgctttaaagattattaagcaacataaaagagcgaaataattgttttaatttgactatattgtatgtctaactatattttcgagtatccctagctcgttaatataaactctatacttaactatttccttacattacttcacatatttaagagctgcatatacactcactccttgtgtacatgcagctctttttttataagtagtatttatctataacttctaaatcatccgttaattcataaacaagcggtgcacctgttttaatttcataattaatgatatcttcatctgacacatcttcaagatatttaatcaatgcgcgaattgaatttccgtgtgcagaaactaataccgtttgaccatctagcaaatattgtgaaatatgatctgtccaaaatggtatcactcgaactaaagtatctttcagactttcagaataaggcatcatacgtttatctaaatgattatatcgacgatcagctaagtaagcttcacgttgttcttcggtttcagcaggtggtttcacatcataagaacgacgccaaatatgtacttgttcttctccaaattcttttctagcatcatctttatttaagccttgcaatccaccatagtggcgttcatttaaacgccagcttttatatacaggaatccattgttgtttagattcagttaaaatataatgcgttgtatctaaagcacgtgttaataacgatgtaaaagctacatcgatggcaatgttattttctcttactttttcacctgctctagtcgcttcattaataccttgttcagataaattaacatcttcccatccagtaaataagtttttagcattccactcgctttgtccatgacgacataaaattaattttggcataacttataacctctttcctttaatctttaggacgttatttcagggatattttaagatgatttaatcttagtaattttcttttcaatatattttaaaattcaatgattaaatcaattatcactagacattaaatacataaatcctattccccattttcattttttaattcataaatgaatcaataaccacctaataacaaatcatattatacacctttgttcgctatttttctaaggtttaaaaaatatttttaggtaaacctaaaaatagatgtaataaaaacgcctcctcagatatttatatatctatgaagacgtttaaatacattatagatggtctggttctgggtgaacgtatactgaggaaataccttttttgtgcaaatgatgttcgacattgtcacaaatttgatgcgcttctactaaggaaaggttagcatctacaacaattgtgacatcaataaacacactacttccatggtaacgccctttaatacttttaacttcttgtacttcatcaacttctaaaatatcattgcgatacgcttctaattcagtttcattgaaaccatcactcaacataaaaattgcttctttaaaaataccaaaaccagtataaacgattagtaagcctagtaatgttgctaaaataatatcgacaattgggaaaccgatttgcgtaaaaattaatcctatcgctgttccaatgctgactaaactatccgataaattatctttggcagccgaatttaaagaactacttttcgttcttttcgctagtctttgattgactgcaaatacaatcaacattacaagaccactgattaagctgacgataattgttattgcgttaggtacaacgtcatcttctttgaacaaacgaggtgcattttgaataactacttggatacctacaaacataatgacaaatgacaccaataatgaagaaatattttcagacttcaaatggccataaggatgatttcgatcggcaggtttaattgaaattttcaatccaataataacagctaaagaaacgataatatctgtcatattgtttaatgcatcggctcttacagctgcagagttaaagacaaaacccgtgacatacttaacaatagataagattatatatacaattaaactcaaataagcaccgcgttgcgccaatttaagattttcattatgagacatgcgttgaaccaccttgaattagtatagtaacaatattatgaatgattcattttaattttacaacgtttttaatttttataaatttttataaaattaaactaatttattcattcgcaacccctaaaaataatttttagcctttctgcgaattttatgagctagaaaggcgcccaactctccctgtttgttaactttcgcctcgaaagtttctatgttgggaccctatgcattagtagcgaagctatctaatgtgttcctttattttctgcgaattttatgagctagaaaggcttatgcagttgacgttttacgtccaactgcgttcctccgtcttcttcaaatttatttgttagaaaggcacccaactctccctgtttgttaactttcgcctcgaaagtttctatgttagaaccctatgcatgagttgcgaagctatctaatgtcgtgaactaattatatagaagaaaaagtgcatcaatgacaaattaaatgagatttctactctaccaaactctcttcgaaagacaattttctcctctatttattagcaaactattgcatttctccatatagtacttccttacttaaaatacgctgaatgttctgaattaaacgcttttttacatagttaacactagttaatctattagttaacattagttaataattagttaatttccatttgtattctcatgtgataaattctaaaagcatacaataaatttaatatgtaaaaagaaagggaatacacatgaaaaataaatatatctcgaagttgctagttggggcagcaacaattacgttagctacaatgatttcaaatggggaagcaaaagcgagtgaaaacacgcaacaaacttcaactaagcaccaaacaactcaaaacaactacgtaacagatcaacaaaaagctttttatcaagtattacatctaaaaggtatcacagaagaacaacgtaaccaatacatcaaaacattacgcgaacacccagaacgtgcacaagaagtattctctgaatcacttaaagacagcaagaacccagaccgacgtgttgcacaacaaaacgctttttacagtgttcttaaaaatgataacttaactgaacaagaaaaaaataattacattgcacaaattaaagaaaaccctgatagaagccaacaagtttgggtagaatcagtacaatcttctaaagctaaagaacgtcaaaatattgaaaatgcggataaagcaattaaagatttccaagataacaaagcaccacacgataaatcagcagcatatgaagctaactcaaaattacctaaagatttacgtgataaaaacaaccgctttgtagaaaaagtttcaattgaaaaagcaatcgttcgtcatgatgagcgtgtgaaatcagcaaatgatgcaatctcaaaattaaatgaaaaagattcaattgaaaacagacgtttagcacaacgtgaagttaacaaagcacctatggatgtaaaagagcatttacagaaacaattagacgcattagttgctcaaaaagatgctgaaaagaaagtggcgccaaaagttgaggctcctcaaattcaatcaccacaaattgaaaaacctaaagtagaatcaccaaaagttgaagtccctcaaattcaatcaccaaaagttgaggttcctcaatctaaattattaggttactaccaatcattaaaagattcatttaactatggttacaagtatttaacagatacttataaaagctataaagaaaaatatgatacagcaaagtactactataatacgtactataaatacaaaggtgcgattgatcaaacagtattaacagtactaggtagtggttctaaatcttacatccaaccattgaaagttgatgataaaaacggctacttagctaaatcatatgcacaagtaagaaactatgtaactgagtcaatcaatactggtaaagtattatatactttctaccaaaacccaacattagtaaaaacagctattaaagctcaagaaactgcatcatcaatcaaaaatacattaagtaatttattatcattctggaaataatcaatcaaaaatatcttctctagttttacatcattttttaaataattttcgtaacaaaccgtgattaaaaagaaccgttgattctcaatcgaatctacggttcttttttcattttccatcaattaaatgcttcttcgctatttgtcagcccacttttttacctgcaacttgttaaataatccttacatcgttaacgaatagttcatcatttagttgaatcagctcaactttattaacttcatattttcacaaactattgcgcaatccattccttttccactacaagcaccataattaaacaacaattcaataaaataagacttgcaaagcatagttatgtagctatataaacgcctgcgaccaataaatcttttaaacataacataatgcaaaaacatcatttaacaatgctaaaaatgtctcttcaatacatgttgatagtaattaacttttaacgaacagttaattcgaaaacgcttacaaatggattattatatatatgaacttaaaattaaatagaaagaaagtgatttctatgattaaaaataaaatattaacagcaactttagcagttggtttaatagcccctttagccaatccatttatagaaatttctaaagcagaaaataagatagaagatatcggccaaggtgcagaaatcatcaaaagaacacaagacattactagcaaacgattagctataactcaaaacattcaatttgattttgtaaaagataaaaaatataacaaagatgccctagttgttaagatgcaaggcttcattagctctagaacaacatattcagacttaaaaaaatatccatatattaaaagaatgatatggccatttcaatataatatcagtttgaaaacgaaagactctaatgttgatttaattaattatcttcctaaaaataaaattgattcagcagatgttagtcagaaattaggctataatatcggcggaaacttccaatcagcgccatcaatcggaggcagtggctcattcaactactctaaaacaattagttataatcaaaaaaactatgttactgaagtagaaagtcagaactctaaaggtgttaaatggggagtgaaagcaaattcattcgttacaccgaatggtcaagtatctgcatatgatcaatacttatttgcacaagacccaactggtccagcagcacgagactatttcgtcccagataatcaactacctcctttaattcaaagtggctttaatccatcatttattacaacattgtcacacgaaagaggtaaaggtgataaaagcgagtttgaaatcacttacggcagaaacatggatgctacatatgcttacgtgacaagacatcgtttagccgttgatagaaaacatgatgcttttaaaaaccgaaacgttacagttaaatatgaagtgaactggaaaacacatgaagtaaaaattaaaagcatcacacctaagtaaacagttcaatcatcttaaaaaatcctgggacacttcatacttgtctcaggattttttaacaaattgaatcagcctcataacattaaattattttatcgtacattaaatttaataataagtcaagtccagactcctgtgtaaaatgctatacaatgtttttaccatttctacttatcaaaattgatgtattttcttgaagaataaatccattcatcatgtaggtccataagaacggctccaattaagcgattggctgatgtttgattggggaagatgcgaataatcttttctcttctgcgtacttcttgattcagtcgttcaattagattggtactctttagtcgattgtgggaatttccttgtacggtatattgaaaggcgtcttcgaatccatcatccaatgatgcgcaagcttttgaatattttggttgatcgatataatcatgaatcaatcgatttttagcctcacgcgctaagttaatatctgtgaacttaaaaattcctttaacagcttctctgaaagattttgaattttttttaggaatggtggtaaagatatttcttaggaagtgaacttggcatctttgccaacttacgttggtgaaggattttctaatggcagagactaatcctttgtgcgcatcagaaataacgagttccgtaccttgtaaaccgcgttcttttaggtattcaaaaaatgttgtccaggtctcttcgctttcgccactttgaatcatgaagccgataatttcacggtcgccatctttggttattccaatcgctatatgacagctttttgagagtactcgattttcttctcgtacttttatatagagtacatcggtcattaagtaaggataatttttttctgataataaacgattctgccactcgttaaccataggttctagctgttctgttaagctagaaacgaaggacttagagacggatttaccacaaagttcttccacaatttttgatactttacgagttgaaacgcctgatacatacatttccaacattgaagccatgagggctttttcgtttcgttgataacgttcaaacactgtgggtgaaaaatggccatcacgtgttctgggtacttttaattctagcgtgcctacacgtgtcgtaaagctgcgctcataatagccatttcgttgactttgtcggttttctgttcgttcatattcttttgcttgaatatattctgttcgttgattttccattagttgattaaataccgttgttaaaatatttttagaaacgtcatcctttacagaatattcaataatgctttgaatctcttcgcttttcagtgtaaaatgtacttgggtcatgtaaaagtcctcctgggtatgtttttgtcgttaaaaacattgtaccgtaaaaggactgttatatggcctttttacttttacacaattatacggactttatctaataataacaactgatttttataagaataaagtatcgaaccatagtagatacacaaataatacaaatgaaacaatttaacttgaaagcttaaataaatattatcaagttaataaacaattaatttttagatggattcatcaaaaatcgtaaaaaagcacaatttgtattttacaaacattaattaaaaaagaaagcaagacattcgtgcaatcggttaccttaaattgtttacaactgtcaacaataccaaggttttattaactatatttctcacaaaattagcttttagcattccaaacaaaaaaggttaaatcgaacggaattatggcatttttaacttaattgtaaaaaaagttgataatggtcaattgttaatgaacagttaattataataacgcccaaaatatattattatttaattaagttaaataaaattatagaaagaaagtgaaacttatgcttaaaaataaaatattaactacaactttatctgtgagcttacttgcccctcttgccaatccgttattagaaaatgctaaagctgctaacgatactgaagacatcggtaaaggaagcgatatagaaattatcaaaaggacagaagataaaacaagtaataaatggggcgtgactcaaaatattcaatttgattttgtaaaggataaaaaatataacaaagatgctttgatattaaagatgcaaggattcattagctctagaacaacatattacaactataaaaaaactaatcatgttaaagctatgcgatggccattccaatataatattggtttaaaaacaaatgataaatatgtttctttaattaattatttacctaaaaataaaattgaatctacaaacgtgagtcagacattaggatacaatatcggtggtaatttccaatcagccccatcactcggtggtaatggatcatttaactattctaaatcgattagctatacacaacaaaattatgtaagtgaagtagaacaacaaaactcaaaaagtgttttatggggcgtcaaagcgaattcattcgccactgaatcaggtcaaaaatcagcctttgatagcgatttatttgtaggctacaaacctcatagtaaagatcctagagattatttcgttccagacagtgagttaccacctcttgtacaaagtggatttaacccttcatttatcgccacagtatctcatgaaaaaggttcaagcgatacaagcgaatttgaaattacttacggaagaaacatggatgtcactcatgccattaaaagatcaacgcattatggcaacagttatttagacggacatagagtccataatgcatttgtaaatagaaactatactgtgaaatacgaggtcaattggaagactcatgaaatcaaggtgaaaggacagaattgatatgaaaatgaataaattagtcaaatcatccgttgctacatctatggcattattattactttctggtactgctaatgctgaaggtaaaataacaccagtcagcgtaaaaaaagtcgatgacaaagttactttatacaaaacaacagccacagcagattctgataaatttaaaatttcacagattttaacatttaatttcatcaaagataaaagttatgataaagatactttagtacttaaagctactgggaatattaactcaggctttgtgaaacctaatcctaatgactatgacttttcaaaattatattggggagctaaatacaatgtatctataagctcacaatctaatgattcagtaaacgtcgttgattatgcaccaaaaaatcaaaatgaagagtttcaagttcaaaatactttaggctatacatttggtggtgacattagtatctctaatggtttatctggtggacttaatggaaatacagctttttctgaaacaattaattataaacaagaaagttacagaacaacattaagtcgcaacacaaattataaaaatgttggctggggagttgaagcacataaaattatgaataatggttggggaccttatggaagagatagcttccacccaacatatggtaatgaactcttcttagctggcagacaaagcagtgcatacgctggccaaaacttcatagcgcaacaccaaatgccattattatctagaagtaacttcaatccagaatttttaagcgtactatcacacagacaagatggcgctaaaaaatctaaaattacagtaacttatcaacgtgaaatggatttataccaaattcgttggaatggcttctactgggcaggcgcaaattataaaaactttaaaactagaacatttaaatcaacatatgaaattgattgggaaaatcacaaagtgaaattgttagatacaaaagaaactgaaaacaataaatagctagtaaaacacggtcgccaacagtaattgtgacgaccgtgttttgatttattatcttagtaatactgccattctttttctcaatgggagatataaaggaatagctacaattaaagtgaatattacgcctggaatcgcgtttaacaacactacccacacaggtaaatttaaaataatagataatagtagcctagataccaaactgcctaatacacttgctaaaactaatgatagtacatttattttcaataaacaaacaactgcaatagctataactctaaatataatagagataatcacattaattggattaaatacgccaaatactagtaataataggctagataataatccacctaaaaagtactttttaattccaaagaaagctaatatcaataatgctgccggtgcagataattgaaaatctaatcctggtataatggacggtattttcaaaactgccaaaatggttaaaatcgcagcaatgacactaatttgagtaatatcttttgatgtcatactaaaacccctataccgtttcataaacaacttgcttcggtgtgctttctaaaaatgatatgtaatgatttaaatcaatacaatcgtccacaaatattattctgcctccatatctcgtattaactggtttaatatcaaataatcgatggtaaccaattttagcagcggcaaaataacctgtcgtatacgttaagtcatcggacacgcaaagttctcctttgacatacggatgcgcattgatacaactagcaattgctaaggcatcagtcactctttcattaagatcacctttattatttatatcttcaaacgaaaaatgtgttgccctaatccccctttgtccaaatgaatctaaacgtttaccagatatagcagatagaataatagctcctgtataaaccgtttcatttttaatatatgtcatcccttgatttagcgcttgttcagtgacaccacattcttgtgttaaatgttggagatttgctttatcatcctcaataatttgtaatgcttttatttgttgaatcggttccatgattttttgtatttttatattgagaaaatccggttgcccattttcatgaaaaaaacctttattataaaacctttgtaccgtctgttctattttgtcaaactcacaaatcgtttcagcaccactaatatgaacatcttgattgctagaacgcatttttatactatacatgacgatcacctcaatcttcttgatgcaaaatttcaaacaacctatctatatcttgttcagtatgaaaatacgacaatgatattcttaacattggcttagtcacagttggataccttaaataacttgtaaacacatgatgctttaataatgtttgatgaatgttctcagccgcttctatgtcatcaaactcaataaacttaatcggcgagtttgaactattataattaacattgagtgcttttaacttttggttaaaatatttactcaaactatttaatttagtgcgtctatcatcagcatttattaacttttcaatgtttctttttataaaatacaaattataaattggcaaactacttgagtagatgagtggtctaccgtgattaattaacatatccttcacatcatttgaacttaaaatcacacccccgtatgcaccacatgctttagataaactagaagtgagtatatctacaccttgataattcgagtaattctctattccaaaactatgtgaaacatcgagtatcagtgttgcgttatatttatgctttaatgagactaattgaccaatatccacaacgtcgccattcgttgaaaatacactatcagatatgattatttttggtatattttgattagggtatttctctaaccttttttctaaatcagcaatatctaaatgcttatatatcactttttctaaaccacttaacttaataccgtcaataatactcgcatgattttcttgatctgaaaacacgacacaatttgtatttttgaaaatattaaataacgccaaattagcatcataaccactatttaagatagtacatgcactatatccgagccaacctgctaacattgtttcaatttcttcataagctgtcgaacttccactaattaatcttgaacttgataagtgataactatacttccgcataaatctttcgaaatcatccttatcaaacgctatttgacctaatcctaaataatcattagatgtatagttcgtacatctcttattttctacttcaatatactgtctatctatataccctaccgatttaagcgaccgatataaccctttctgttgtaataaatcaatttgctcttgaaacttcattcttgttttccttattttcacaagtgtcataatcaatttcaaagcctaaatcattaatcatatcgtagtctaattggttcggttgcccaccagtaattagataatcaccgacaaatattgaattcgccgcttttaatgctaatggctgtaacgaacgtaagttgacctctcttcctccagcaatacgaatttctttcgtaggattgattaatcggaataatgctacgattcttaaacatttcattggtgttaaatcatccatgcttccaaactttgtgcctttgattggatgcaaaaaattaatcggaatactgtcggcatccatttcttttaaagcaaatgccatatcaacaatatcttgattagattctcccataccacaaatcacgccagaacatggtgatatattattcgctttcattagttctatcgtatctgttctatctttataactatgcgttgtcacgacgttatcatggtaattttcacttgtattaatattgtggttatatctgtctacaccagctgacttaagtttcttagcttgttcgtcattcgttaatcctaaacatgcacagatttttagttgcgggtgttgagatttaatcgttcttacagtattactaatatgatcaacttctttatcgctcggtcctctaccactcataacaatacaatatgttccaatatgattatcatgtgccacctttgctccatcgataatttgttcctctggaattaaagcatatcgctgtttttgtttaatatctcgtgattgtccacagtacccacaattttcaggacatataccacttttagcatttaaaatcatgtttaattttacttttttaccaaaataatgttttcttaaaatgtacgcctcatttaataaatctaaggtatcaatattagtatcctcataaattttcaatacagtctcttttgttaattgttccccttgtaatatgcgtttagccaaattcatattaacacttcctatctaaaatgttatgtactgcctttttaaaaatacgtaccatcgttttcacttctttatttgacatacttaacactggcacaaacgtaatgacattttctaaatttctaatcattagcccgttttctttacaattacgtacaatacgttcaactttttcaatttctaacggcgttttactatctttatctgtaactaattcaactccaaacattaagcctcgtcctcttacatcaccaacatttcgatgacgcttcagcgcatgtaactgtttctcaagtgttgatgatgtcgtttcaatatgtgacaataacttacgtttttcataaagtcttatattttctaatgcaaccgtacaaacgatttgatttccggtgtatgtatgaccatggaaaaaggtattcacaccatgcgaatcacttaaaaatgcattgtatatttttttagatgtcaatgtagctgcaagtggtaagtagccaccagtaatcgccttacctaaacacataatatccggttgaacatcttcatgattgcatgcaaacatctttccagttctcccaaaaccaactgctacctcatcacaaattaataagacatcgtattttttgcacaatttctcgacttctttcaaaaagcctttaggatgaacaaacaagcctgtcgcaccttgaatcaacggttccaatataaaccctgcgatttcatcatttctttcaattagaatttgctctatattcgttaaaatagctgtcatcatttcattttcagtatcgtaattactgcgatagaaagatgggctttctacttgaatattctcaaatattaagtctttaaatattttatgaaaggtcttgataccaccaacacttaccgcaccaatcgtatccccatgataaccgtgatttagcgttataaacttgtttttcttggcatatttttctctatcaatatttttccaatactgatatgccatctttattgcgatttcaacagacgcactgcctgtatcagaataaaatacttttcttagattacttggcgtgatttcgattaatttttccgcaagttctattgacggaatatttgatgatcctagcagcgtagaatgggcaattttattgagttgctttttaattaccttatttaagtatttgttattatgaccatgcacattgacccacaacgatgcataaccatctaaatatttattgccattcgtatcgtaaaggtaactaccctttcctttttcaatgatgattgcttcttctttgctatatacacccatttgtgtaaatggatgccaaacatattctgagtctttttgtttaagttgttgtgtgtaattcatttttaactcctattaattgttttaaaaatgcttctgagaaattttcatacgtggcatgttcttcaaatgtatagactgttttatttgttaattttccaatcgtcatttgattgtctttttcaatatagctgtctgtatagcgattcattattaaaaaattactcgccgatacattctgattaacataatcttggtgaacaatggcatcgctaatagcacctaattttgatggcaacacactgatgacacaatctgcacaatcattgattagatctttagtcatgtagaaatcatctgtaccttcatatattggtacggcaattcccccagcaccctcaattaagataatatcaaattccttatctaaaacttttaccttatctaatacacgctgcttatttagaaaaatttgatctgtcattttaaatgcaaggtgtggtgatacaggttgcttaaaagtataaagtgacgttatgtcatagcttaaatcacattcatttttaaatacttctaaatctggaaacgtcccgtcttggcgttcctcagtttgaaatggtttaaaaatacaaactcgatgaccacgtgttttcaaagcatggtataaatgctttgtaacataggttttgcctacatcagtattcgtacttgtaataaaaatcctcataaaaataaccacctcaatccaaatgtaaacttttataattaataagtttacatttaaggcgcatgtttttcaagaaaacatgaatttaaacttctcagtataactataaattttggcaaaattttgaccttgctattgaaatgactaagacttcttaaggaattcgggcagatataaacagcgattcgataaaatatgtcagttaaaattaataattgcattatttcttaataaaaagacatcctagctttaccatcttgtgaaacaatccattaattgtaatattacgttgagcgccttgttcatcaatgctataattagttacataataaattgaacatctaaatacaccaaatcccctcactattgccctagtgaggggatttattttgctgttgattatctatcaccctttttatttccaaattctgattccatattaaactattatttataatttccagcctgctgatttactttttattcttataaagtcttgatacattcctggttttcgaattaattcatcatgactacctttttgaattatttcaccttcattgagcactataatctgatctgcatttttaatagtttcaagtttatgtgcaattgtaattactgttttgcctttacttaattcattaattgccgtttgaatcagctgttcattttcagggtcaatacttgcagttgcttcatctaaaataattattggtgcatcttttaatatcgccctagcaatagaaatcctttgcttttctccgccagataaattactacctttttcatttagcattgtttgatatccctcaggtaatgacatgatgaagtcgtggcaacatgcttgcttcgctgcacgaataatttcttctttcgttgcacctggattgccaaacaatatgttattttcaatcgtatcattaaataaatacaccttttgaaatactgcactaattttcgacattaacgtacttaatgtcatatctttaatatcaacaccatcgatgcgaatatttccatcatcgatatcataaaagcgcaagagtaagtgacataatgtagatttcccacttcctgaaggtccaattattgctgttgatgtttgtgtaggtatctcaaaattcacattctttatcacttgtttatcatcatatgaaaagttcacgttttgaaaagcgatattttcatttttaatcgtcaaattttttccattctcatccagttctggagcattttttatcttttcaatatcatctatcgtcatatctatcatttcaagtacgtgtgcagcactattaatattttcaacactatcaaatatcacaaatgaaaaaattgaaatcataataagggtaggtaaatcaatactatgattcatatataataagcatgcaactaatacaatcattattgaaacaacttttaaactaagtaaatgcaataaattgaatgggatatattgcatttctatttttgtatttatacgtttactttcattgactgcttggttaaaacttttaagactcgtattttctttcgcgaatgattttattacttgaataccacgaataacctccaataccttttccactaattggttttgtacattatgatacgctggcgcattttgtcgactctttctttctaataattgaatcgcaaaaaatgatagtaatacgccaatgcatgctaataatgatacttgccacgaaactacaagtagagacaatatgagtactgtaattaatatgtatccattaacaacaacgtccaccattttcatagcaaagttttctaaaaaggttaaatctgttgttactattgttgttaactcatttgaatgatgcgaattaaaataacctaaccttacatttttcaatttatcccctatatctaaacgttctttcgcactcatttcataagcgatgctctcatggcttttgcttttgaaatatgctgtaataaatcgtccaatcactaataaaaccatgataattacaacattcaatatatctttcatataaataggtttatgagatagcacattattaaatatttttgcagctaaaaagataggtaacgcaataaaaatagcatttaaaaatgacatgctaaatcctaaaatcattcttgctttatatggtcttatccagtttaaaattttaaatgtaatttgaaacatatttgacctccttttctcattagtttaattatgtccagtattgattccccaatcttttgtatgcatgtgcgtatcccacattttcttataattaccgtttaattttagcaataagtgatgtgaccctttttctaaaatttgttgtttacctaaaacaataatttgatctgcatgttgaatcgtagataaccgatgtgcaataacaatcaatgttttatcctgcgtcaacacatttaatgcttcttgaattttttgttcgttgtctggatcaacgtaaacagtcgcttcatctaatacaatgataggcgcatcttttaatatcattcttgcaatagtgactcgttgtttttcaccaccagacaatttatctcccactgtaccaacattcgtatcatatccatctggcaacttttcaataaattcatgacattgtgctaacttggcagctttttcaactgcctcatccgtagcttctggattgccaagtttaatattttctttaaaagtaagatttaataaaaagttatcttgtccaacaaaaccaactaaatcgttaagttgtttcgattcaatatcttttatatttataccgccaatcgtaatttcacctgaagtcacatcccagtatcgtgatataagcttggcaatggttgacttaccgctaccagatgccccgacgatagctgtgaaattattttctggtactgtaaatgataaatgcttaaagaccagatcgtccttatctttgttatatgaaaatccaacattattaaaagcaatttcataatgttgaggcttcttaaattttgttgacaatactaactcttctagacttaatatttgattcacttcagttaatgcgtattgtatagactttaaatgatttacataattagtaaaattcttaatcggtgctactacacctaaagataatacgatgcataggaaaaattccgcatagtttaattggttgatagatatcaaatacatgccgaccggtaaaatccctaaaaatgttgaaggtaatacactagctcctaaattcatatacccccatgtatttttaaaccaattcaaagtgtgaatcttataattatctactgcatctttatattttttatatgaactttgagattgattaaatgttttaatcacttcaatgccttcgataaactctacaatcgcgctattcatataattattcgatttcatttgttcagcatatgtctcattaaatccagacataacttttttaaaagcgaaaattgaaattggtatcgttactaataaggcactagccatacgccaatcaatgagcattatgtataaaaagatagcagctgacaaaagtaagtttcctataacttcaggaatcatatgtgctaaaggtaattctattgtttcaaccttatcgacaaatatattttttaattcacctattttcttagattccactacgcctaaagggagacgcattaatttttgagctaattttttacgaatttcagataaaatttcatatgccgtaatatgtgatagcatcgttgacgctccaaaacaacacacttgtgaaatataagcgattaaagcaataaagatataaaccataatcgaattaatcgtatatgtattgttaatcatcattaaaataattttaaatactgcccaataaggaactaatccagaaaagacactgatgatagacaacaaaattgataacataattttccatttactatcagaagcaaatccgctgagtatctttatccaatttgtctgattgttcatcgtatatgtaactcctttcaattaataatctaaattaagccgcttatattatttatttcactggatgatatacataatataaatttgttatttgttaaaaattaatacttattacaagtacatcatatattagttgataacgattatcaatgtcgcgtggatttgtgacacatttcttttaaaaattcacaaggttatggggcagaaatgataaagagccactaatgatttattatgtagtggttctgggagtgggacagaaatgatattttcacaaaatttatttcgtcgtcccaccccaacttgcattgtctctagaaattgggaatccaatttctctttgttgggtccctgaatatagccttgtagagtctagtacattgatttgtatcccaatgtccctataattgattattcgctttatctaatgatcctatgactcaactattaaatcatttttcgaaatacttaattctaatataattaaattcatttattgtaatattgcaaaaatacattgcacaccttgttcatcaatgctataattaattacataataaattgaacatctaaatacaccaaatcccctcactactgccatagtgaggggatttatttaggtgttggttatttgtcaccttttttattgttgcgcgttcgtaaccaatgtgcaaaaaacgcaacaagacagccgcttatagctgaagtcatgatgttaattaataaattgaacatccgtcatacacctcctctctgcgttaaagtaacgcccgagatgttaggcgaccatcatattatatcatttatttattatatttcacgcaatattaaggcttaagtaaagttttttttagtggtttacgctactttaattgctatcttttaaaatccatttagataatataaatgtgatgggtatcgtaataattaaaccagcaaatggtgcaatttctgctggcaaatttagccaggatacaaatacatataataaaactgtttgtaagcttacgttgacaatctgcgtaattggaaaactaatgaattttctccaagtaggttttaccctgtaaacaaaataacaattcaaataatatgaaatcacaaaagcgactagaaatccggtaatatgactaatcatatattcaatgtgtaataattttaacagcaataaatagacaacataataatttaacgtattaatgccgccaacaatgataaattttaaaatttcagcatgcgtttgtgttagtttcatatgtgtaactcctcaacatcaaaatatatgcataactacgttctcgaacatactcgaatatgcgagccaatccgcttcacttcaaatatgcttatttcaatctttataccctttcacagcaaatttagtctctttcccctcatccttatacgccattataatgtaactgatttatcgcgtgactcattagcactatagagattactttagttcactagtaattttatatacaataagagcgacaacagtaatgagaggatgtctactatgcaattacaaaaaattgtcatcgctcctgactcatttaaggaaagtatgaccgcacagcaagttggcaatattataaaacaggcttttactaatgtttatgggaatacccttcattatgatatcattccgatggctgatggtggtgaaggtaccacagatgctttaatgcatgcaacaggtgccactaagtatacagtcatcgttaatgaccctttaatgcgacctattgaagcatgttatgcacgcgcagacgaacaacaaattgcaattattgaaatggcggcagcgtcaggtttggatttattagaaaaagaggaacgtaatcctttatacacatcatcatatggtaccggtgaactaattaaagatgcattaaatcatggtgctaagaccattattttagggattggtggcagtgcaacaaatgatggtggtacaggtatgctaagtgcactaggcgtaaagtttactgatgtaaacggggacttattacaaatgaatggtgctaatcttgctcacattgcacaaatcgatataaccaatctagattcgcgattaaaagaggtgacctttaaagtggcctgtgatgtttcaaatcctttattgggtgaaaatggtgctacctatatttatggtcctcaaaaaggcgctgatgcaaagatgataccaaagttggatttcgcaatgtcgcattatcatgataagataaaaatgtgcacaggaaagtccgttaatcaaataccaggttctggtgcagctggcggtatgggcgcagcattattagcgttttgtgagacaactttaacaaaaggtattgatgtcgtctttgacattacagattttcatcaaagaattaaagatgcagacctcgttattactggagaaggacgcatggattatcagaccatctttggtaaaacacccgtaggcgttgcgttagctgcaaaacaatatcatattcctgtcatcgcgatttgtggcagtctaggcgaaaattatcaacatgtttacgatttcggtattgatagtgcctattctataatctcttcacctagcactttagaagatgtcctacaaaatagcgaacaaaatttattaaacactgcaactgacattgctcgtattctgaaattacaataatgtcaaagtaaatcatcagctttattatttgcagttaaaacctgaatgaggtgaaacccatgaaaagaactgataaataccgtgattcatatcaatacgacaatcaaaaccaaaatcatcgtcgtcaatctgaagacgcatcgtatagacaacaatatgctaaaggcgatcctgaagaacacccggaacgatactataatggtagagattatcgaagagaacaaattcttgaagaagaaaacgagaaatcccgccgttcaaaaaaatggttatatatcattattgccattctcttaattattgtcgctatttttgtcacacgcgccttacttaacaatgatagcgataaagttagtaatgaccctaaagtctctcaaaattataaaaaacaagttgaaaatcaagacggccaaattaaccagcaagtagataatgctaaagaaaatattaaaaacaaccaaaaaactgatgacattattaaaaatttacaaaatcaaatcgacaacttgaagcagcaagaacaaaacaaagctgattctaagctaactcaattttatcaagaccaaatcaacaaattgacagaggcaaataatgcacttaaaaacaatgcaagccaaggtaaaattgaaagcatgttaaatgatattaatacaaaattcgacagtattaaatctaaattagaaagcttatttaaagatgacaatggtggcgctaattaattattacacctgctttgatgataaacattaattccctatactttatctgtatcactacgttattcgtgatgatgcattaagagtatagggattttttatataaacttgtattctaactacatacaaatacacacaaaacgtatataatttatataattatatcatttaaaggagtctgatcatgcaatcaacgaaaaccaaaacgaagcatttttcatttttattgctaattacgttaggcgtcatgaccgcttttggcccactaactatagatatgtacgtaccatcattacctaaagtgcaaggtgattttggttctactacatcagaaattcaattaacattatcattcacaatgattggtcttgcactaggccaatttatctttggacctttatccgatgcttttggtcgcaaacggattgctgtatccattttgatcattttcattttggtatcaggtttgtctatgtttgttgatcaattgccattattcttaactttacgatttattcaaggtttaactggtggtggcgtcatcgtgattgcaaaagcctctgctggtgataaatttagtggcaacgcactcgctaaatttttagcatctttaatggtagttaatggcatcatcactattcttgcaccattagccggtggattagctttatccgtagcaacatggcgttctattttcacaattttaactattgtggcactcatcattttaattggcgtcgcttctcaattacctaaaacatctaaagatgaattaaagcaggtgaattttagtagcgtcattaaagattttggaagtcttttgaaaaaaccagcatttattattccaatgctattacaaggtttaacttatgtaatgctatttagttattcatctgcatcgccatttattactcaaaaattgtataatatgacaccccaacaatttagtatcatgtttgctgttaacggtgtaggtttaatcattgtcagtcaagtcgttgctttattagtagaaaaattacatcgccacatattattaatcattttaactattatacaagtggtaggtgttgctttaattatcctgacacttacattccatttaccactttgggtcttactcatcgcattcttcttaaatgtgtgtcctgtgacgtcaattggaccgcttggtttcacaatggctatggaagaacgaacaggtggcagtggtaacgcatcaagtttacttggcttattccaatttatcttaggtggcgctgttgcaccattagttggcttaaaaggcgaatttaatacatcaccatatatgattattatcttcattacagccattctattagtcagtctacaaatcatttactttaaaatgattaaaaagcaacatgtcgcataacacttcaacataattagaaccctagcaaagatatctatctttgtcagggttcttctttatgaattatgagatcgaatcttcaactaaaattacgccttcatagcaaggacatttctattcaatcaccctttaacaggcatccaaatttctgtaatatatttttcacttgtagtatcaccatcctgatacaactcaaaaaatggtgctgattttaccgtatctgcttgatattgatgtatgtagtgatgaacctcttccattttttgttgaactgctttaggtactgcgccctgtgcttcaaataccatatactttgaacttgctaatgttatgacatcatatttttcaatatcagcactattatctccggtaactgcaatcatatatgacatcttaccgtctaattcaggtatacataagccaagtatcccggctaaatcaccattattttttaactgtaaatccgcaattactccctcttgataacatctttgccaaaaccctgctatatgttgctgagcctgtcgtccattttcatacgtttctttaatacctactaacgttaacgacgcaagttgttgtaattgatattccattttatcactccattaattttattcactcatgtaaaacatatgtttaggacattttgcattgacgctatataattatattaaatatttattgaatcaatgcgaggactatattatgaaccgaaaaatattaccagttaaacctatcagtcagctatttcctatccctatggtcatggggtgtgaaggtgtttccgcagccatgatgttgcaatacaacaaccaacatatccctgctacagaaattatgagacattggccgacacatccgaacaatccacataaaggttatgttggacatcacttattcattaagcttggcaattatcatcaaacgatatttccagaagcatatgtaccatttttacaaaaatacaatcctaatatcgtagacggcactggtaaatcgttagaagatcttaaaggtattatcgatcaaggtcaacctgtgttaatataccatactaatcttggttctaaaccattactacgtgttttccgctttgataacaagccagcgaaacaagtttcaaatattcacgtaacgttactcattgggtacgatgattactattactattatatcgatccactttggagtcatattcgtcgtggcctagttttacctgccatcattccaaatcgcaaacaaattattaaaattcgtaaagagaaaatggaatacagctttaattcaccaggaagaaagtgcatttatgtgcaaccacattcatatacaattgaaaatcagcaacaaaataaacacacgtaagtaaacacattactcgcgtgtgtaaaacataaaatgcgcaaactgggtcaggtttgcgcattttaaatttctattatttgtatcgtctcatttatttcctggtaaatatcttctgaacgccattgtcttggatagcctagacacggacagagataacatctgccatcatctatcacacttttacgaaaatgaacatggcccataatactatatggtatatcgaacatcgcatacaaaggattgaaatcacttgtcccaataaatgcattataaaaatcgaatatacgatgcggcatagaaacaatgaaatcagggtgcgtcacaacatgtgtgactaaaatcactcgtctatttcctacttctaatatatctttcttcacttgttcagccgctattttagataaattttgatctgatatgccccaagatattcgttctttatcttgccaagtcgcaccataatgttttcctttttgtaactcatctaatgaaaatcgttgtgctgcaaagctataatcataccagccagtatgtcctatgattgcccattcttcatttactataaatggttttcctaccaagcactgtgacatactcttataattattccaaatgtcttgcgtagtcatactttcaacttcccataaatcatggtttccaggtacaaatttcacaggtatatctaattgttttgtcaattgcgttataaattggtgcgtcaattgataatgatttgagatatcccccgcaatcaacaatatatccaatttcttatacttaactatttcaaccaatgcctctaagtaatcttcggatgtttttttattatgacgatcaatatgtaaatcggcgattgtccctatcttcatacccttaccttctttactcaaattaaaatgttatttattatgccatagcttatctaatatatatagttaactgcttcatttagatgattattttatatttttgcataaaaacttatatcttttcaaaaaatcgataagttttagttatcatacccttacctatcaaatgttttttcttatatttaaaaaaataattgctttattaaatggatttctttagtatttataattaagaaaacgcttacacacaacttttttatttgctttatcctgaggaggaaaattatggcaagaaaattgcatagagagttgaataacagacacatccaattaatagcaattgggggcgcaattggaactgggttattcctaggatcaggtcaaacaatatctttaactggtccatcactgttattcacatacatgattattggggttgtactattcgcttttatgcgcgcattaggcgaattgttgttgagcaatacaagatttaattcatttgttgatattgcaaatgaatatttaggcccttttggtggctttgtcattggctggacttactggttatgttggattgtatcaagtatgtcagacctaactgcgatgggacaatactttgcattttggtatccacaagtcccaaattggattaccgtgctatttattgttttaatcttgattagcttcaacttattaggtgccagattatttggtgaactggagttttggttctcgattattaaagttgtcacaattattgcgatggttatcgttggtcttgtattaatctttttctcatttaaaacacattatggacatgcatcattcacaaacttaatcagtcacggtggcatgttccctggtggaacatttggtttcttaatgtcattccaaattgctgtatattcattcattggtattgaacttataggtgtaactgctggtgaaacgaaagatcctgaaaaaaccttaccgaaagcaattaataatgtacctatccgtattttattattctatatcggtggtctattagtaattatgtcagtcataccttggaatgatatcgatccaaatagtagccctttcgttaaactctttacattaatcggcgtaccatttgcagcaggtgtcgttaactttgtcgtgctaactgccgcggcctctgctacaaatagtggtatctattcgaatagtcgtatcttattcggactgtcacaacaagggttaggtcctaaagttttaaataaaacgaatagtcatggcgtgccttatttatcaatgttagtttcatcaattgcattacttatagcagccttgttaaactacattttccctaatgcaattcaactattcatatacgttacaacgttatcaactgtgttgtttttagttgtttgggcaatgattattgtcgcttatctaatgtatttgaaaaagcatcctgaggcacataaaaacagtaaatttaagttgattggtggtaagcctattgcttacattattctagcgttcttcttctttgtattcattttattattctttagtgacgaaacaagagcagctatttatatttcgccattctggtttatatttttatttttcttttataaaaaatacaaaacgaatgctgaaaagctcgcgtatgaacaacgacaaaatgacagcggtcatttcagatatgacaatcaataatttaaacatctcgctctagtatcagttcaaccgatactagagtttttttgaaaataacttcattttatcaatatatctatgtcattatgccttaaaagtgataaaatattaactattaaaattttgaggagtattgtatggcactattagaagcatttttaatttttatttttgctgtgattattagttcggttatcaataatcgattcccacaaattcctactgcctttattcaaattgcattaggtgtcgttattttcattattccaatacaagttgatttccaattcaattctgaagtatttatgtttgccgttatcgcgccactactttttgtggaaggtacccacgtctctcgaacaaaattattagaatatcgtaaacctatactattaatgtcaatggcactagtgtttgcaactgtagtcggtgttggctattttatacattggatttggcctgccttaccaatgccagccgcttttgcaatagcagcaattttatgtcctactgatgcagtagcagtatctgctattacacgcggaaaattattacctaaaggttctatgacgattttagaaggtgaatctttactcaatgatgcagcaggtatcatttcatttaaaattgctgttactgcattagtaactggtaccttttcattattccaagctgttgaacaatttatcatttcaacaatactaggtgtacttattggtgcaattattggattcgttgtcgttagaatacgtatagacttaaccgctaataaaggtttaaaagataacaataccttaacttttattcaattattaactccttttgtcgtatactttttagcagaagaagttcatgcttcaggtatcattgcagttgtaatcgcaggtctaatccatggtttagaacgcgaccgtttaattagagcacaaacggaactacaaatgaattaccatcaaatttggaacacatttagttatgccttaaatggttttgtatttgttgtattaggttttatgattcctactgtagtcatagatattttccaaacagagcctgacaacttttcatttttaatagtgatcactatattaatcgctattgcaatttatgcatgtcgatttgtttgggtttatttctggtacaaagatttttatttcccgaaaaatatacaatcttatctagacgaggaacatgattcacatgaaacaccaccttctcgagtgcgttacgcatttattatgaccatgtgtggtattcacggtacaatttcactttcaatggcacttacattaccatttatcattacaaaaggacaagcattcgaataccgtaatgatttattgtttattgcatctttcatggtattaattagtttaatcttagcgcaaattgttttacctttaattacaccatctgccgaagatactacttttaaaggtatgacttatcaatctgccaaaattttcattgttcaaaaagtgatccagcattttaaaaacgaaagtaaaaaagacaaaaacgatacaaattatcgcccagtattaaaccaatactatggagaattgttatttttattaaattcagaacctgataatcaaaatacaaaagaactcaaacgtttagaagatattgcaaaagtaatcgaaacatctacacttgagcgtttaattgataaaggtaaggcaacatatcaggatattaataattaccgcaatattgtcgaattaacagagacacaccgtactgcatcatttgttgaaaaatttgcaaacttcttcaagatgttatggcttagacttaaagcgatgaagcactacaaagccttaaataaagaatctaagaagcaagaatttgaaaattcattcaaagatgttcaaaaaattatgcgtattgtgaatcacaatattattttacgcttaaaagaagaacaaaatagtacaaatgtacttgaggttagcttagtcattaatcattactatgatatgagtcgctcattaaagtggcgtgcacaacgtcgaaaagaacgtcaagaaaacagcaatcaaatcataccgcaagctatgttccataaccacaaattggaagcattgtacttacaacgtcatcttttagatgaattaattcgcaaaaataaaatcaacaatatcgttgcagctcaaattcgagaaaatatcaattacaacgaaattgtcttgtctttacagtccaaacattaagcaagacataacaatacccccgtacatatgagacaaagtcattatcatctcatatgtacggggtttttatattcaacatcaaaaaatcagattgatgaaaagtaaataacctttcatcaatccgatttgattatagaatctattttttaagtttaaatggaattgtacatacgttaacattcttttgataaattaaatacaatttcatacgcaaactagtttgattgtgtaataaattatgccaacgtttcttagtaataaattctggtatcactactgtaatcatatagttttgatcgttggctttacgattaatcttatcgataaaacgtgaaattggtcgtataatactgcgatattccgaatgtaaaataactaatcttacatctgggaaatgacgtttccatttctcttggaatgctttttcatcttcatctccaaatgatacatgtactgctatgacatcattattcgcaagcatttgtgcgtaataaatagacttatcaactgctgttgtaatacttgttatcggcacaattgctaaattacgatctaccacgtccacattaagaacatcaatgtcagaacgtaattgttctgcgatatctcgataatgtttgttaattttcaagaagaaaatcaccacgaacggcaagaaaataagtatcggccatacttggctaaatttagttatgagtaaaatcataaaaacaataaatgtcacgataccaccaagtaagttcacagacaacttacttaaccaattcttaggacgttcatgaatccatttaataaccataccgaattgtgctagtgtaaatggaataaatacaccaaccgcatacaatggaattaaatcttcagtcataccatcaaatacaataattaaaataatggctaatacacctaaaataataatcgagttagagtagcctaagcgatcacctctaacagtaaacattctaggcatatatttatctttagacattgaagccgctaacatcggaaaagctgtaaatccagtgttggctgctaataccaaaatcatcacggtcgttgcctgtacaaaatagaaggcagcattatcaccaaatatttgcatagctaattgtgataaaactgtcgtttccgtttgtggcaaaattccataaacatatgctaaaccaacgataccaactaataaaaacgctaaaattgaacccatagcaattaacgttttcacagcatttttagcacttggctctctaaaattggttaccgcatttgaaatagcttcaacacccgttaacgatgaagcccctgatgaaaatgcttttaatagcaagaataatgttactccaggaaccgcagttcctactgatgcatgcatatgtggttgaatatctcctgtcgccacacggaaagtacctataaatattaatatcactaaccctataatgaaaagatatactggataggataatacggtggcagattcagttaaaccacgtaaatttaatattaaaataaaaagtacaagtaaacatgcaatcagtactttatgcccatataaacttgggaatgcagcaacaaatgcatcagcaccagatgatatactaacagcgacagtcagtatgtaatcgactaataatgagcctcctgcaagcaatccccatttttctcctaaattggtcttggacaccatatacgcgccgccacctttaggatatgcataaataatttgcctataagacataattaaagcagctaataagatcagaacagcacctgcaatcggtaaagtataccaagttgcaactgcacccactactgatagtgtaatcagtatttgttcgggaccgtaagccactgaagataatgcatccgacgaaagaatcgctaaccctttaaacttcgatatcttttcgtcttttagttctctgttttttttaggttgccctataataagtcttttaaattgattgaacataatctcctattcctttttatagtttttgatggatatcactatacgcctatctttccaaaaagtatagagagttaattaatattttttatgtaattatacacctattaacatataaggtgtcaaaaataatggtaaatatacctctttaattaatttattcaatagaactggtataataaaataaatctcattaggcacttaagtaaatttaacatataaaaaggaacgtttatgactactaaaaaactgtattttctatccatttctattatcattttagtcgccatttcaattgctatatatataacattaaatagcaatacgaagacacggttaaccaatgattcgcaacaacaaatagatacaattatcgagcatgatttacaaaagggacacattcctggagcatcaattttaatagtaaaaaatggcaaagtttttttaaataaaggttatggttatcaagatgttgataaaaaagtcaaagcttctcccacaacaaagtatgaaattgcttctaatacgaaagctttcacaggtcttgcaattttaaaattagctcaagaaggtcgattaaacttaaatgatgccgtatccaaacatgtgcctcattttaaaatgaactataatggtcaaaatgaaactattacgattaagcaacttttggctcaaacaagtggtatacctagtgatattacaagcgaagattctgtgacaagcaaaaataatcgtttaaatgatgtaacccgtgcaattatgggtgatgaattacatcataagcccggagaagaatttgaatactcaaatatgaactatgatttattaggtttaattatccaaaacgttacgaagcaatcctatacaaaatatattacaaattcatggctcaagcctttgcatatgacacatacatcattcaaacaaaccaattacaaatcaaaacatgatgctattggctatgaattacaaggttcgacacctgtcgtctctaaacctgaatttaacctttgggatacaccatcagcatatatgatgacatcaactgaagatttggaacattggataaaattccaacttaatccacctgataaatacaaatcattagttcaacaatcacataaaaatttatcttcaacaattggtgaacctaatgccaatgcatatgcttccggctggtttaccaataatgatgaacatttagtgtttcattcaggaacgctagataacttttcatcatttattttactaaatccaaaacaaaattatggaattgttgtacttgcaaatctaaattcggaatatgtacccaaattagttgagcatcttaatacacaaattgtaaatcacaagcgatattcgacggttgcgtctatgctcaatcaatataaagatcaatttaatattgttaccgttttgatgacaacacttattttattagcatttatattctcagcttatcgtgcttggcaaatgcgccatggtcaaattcttttgcgtagatcaaaacggattgctgtattgagttggttatcattatgtatatgtatcgctttagcgctcatattatatgcattaccatatctcattctcggtagcaataattggtcttttgtactgacttggctaccaatagaaattaaattagcactaatcacaacattaattgcattattcagtacattaattgtaattctgttattccttcatacaaagataacgaagacataataaaaaagacttgttcgagccgtgcgtttgataatatatcatccacgattcgaccaagtctttattctttgtatattaaacggataaattattatttaattggattcatgccatctttccaagtttgataaatcagagtaccaccttgcgctttaaacttctcattgcttacgccacgttcaaatggttgcgcaggttgaatatcaatatttggttcaacaccaagttgttctttataccattctgcaaattcagaacctttaacaggtgcatcatctgctacattatagataccattttcaaaatgaatagcttgaatagatgtttcaactgcatcatcaagatgcacaaatgatgttacgccatctgaaagtgtcacttgaccatccataaattgattataaatcatgccatcttttccgtaccaagtacctgggccatataaccagccaaaacgtaaaacaacgtattcatccatacgagccgtttcttcttctaaaccaaccacaccatcaaccgttacttttctatcgccagttgagttaaaatcaagtgaagtttcctcatttgctaatccttcgccaggttcatacataaaggcaatactttgggcaattactttcttaacgtcatgctttttcgccgcatcaattaggtttttagaaccttcaatacgtactttcgtatttgctgccatatcaacattttttaaatccgtaatttgattgataatgatttctggtttaaaatctgctaacgcttgatcaatagtatcagcttttaatatatcaccaatatatgcttttacattaacagcagctagcttttgttgaccattctcagatgtagtaaaaccagcaacctcatgcccctcttcttttagtctttgaactaatttaatgccaataaggcccgttgcaccagttacaaaaattttactcattataaacaccttttctctatttgtctttttaatataattacttgcttgatgagtttacaaaattcacgtgagacttccaaatgatttgcctcaaaatttttcaaagtgtcgtcgtaaaaactgtctagtaaatactaatagtatgtcgtagacctatgacaaatctgaattatgacgaagatcaatcaagaaaaacagcaccaagatcatttcaatttgaaagtaccttactgctgttctttatttattacatttcaatcttaataatgaccgtaatatcacgtgattgtcatttccttgtaatcatacctaaaacaccaattaatcctgtgcgtgtcgctgactttctttagtatgaattaaatcagtaataaagcgattgactggcgcttcaatatgacgttgtttacctaatgttgcaactgcgccattaatataatcaatttcagtttttctattattaacaattaaatcttgatacatggatggataatgcgcaccaactttttcatttaaatcaactaaatattcaaatacttcatcaacatttaaatgaacattatcaatcgtcgctacatgcactatttcttgcgttaatttataaatcaaacacttcgcataactactttcattcagcgatgccatattacactccaacactgtgcttaatgcatttgccgtaccattaacacaaatctttttccaaatcgattggtataaatctttactaatgacaccattcaattccgcttcgttaagtaaatcagcaacttttataacattttctttaccttcatccactagttcacctatttcaactggtccactaccaagtaaatgactgtgtccagggctttcaagacctgccgtccaagtcgtaacacctctgacaatttgtgattgagcaacatactgcgcaatgacttcttcatgcttcagaccattcatcgtacatacgacgatcgtttcattatcaatatgtggcttcatatcttccatcacttcttttaattgcatagactttggaaatagaaagacaacatcgtaaatgctttcgtccggttgatcattaaaatgatacatcggaatgtttaactcgaatgcctctccattaatcgttatatttaatccatgttgcttaaccgcttcaacatgagatgtatatccgtcaataagtgtgacatcatatcctgcttgaaatagtttggcaccaaagccactacctaatgcacccgatccagcaattgcaattttcatcctataaacccctcttcatcgttgttgttcattttaaaaatactactttcgcatattagcgtcaatttgaaaatcattcgcttaatatgcacacagcttttatcgtctataaaagaacacacctaacattaaacgtcaatacgcaacattaagtgtgtatgataaacttactttcacaaaatttcctttaaaatccctacataataacttgctttcatttcagttttacaaattcgtttgatttttaggaactaatagtaaaatgactaaaaatgcaacaattgctagcaaggcattaaacatcatacctgtgaaaccacctaagttcaaatttaaattagctgctaacacagtataaaccgtaccagatactgctactccaaatgcatttcctaatgatgacgccattttatacacacctgaagcaacacccgacttatcatctggcgcactagcaactgctgtatcagttgatggtgtagcatataatcctaaaccagtaccaaacaataaatatccaactatactagatatgatataccacacttctggtaaaaatgttaacgacaataagattaacccaatcactgtaaagccacttcctagtaatagtgggcgcttcggaccatgttgagataaaatcttttcacctacacgaatcattgacaacactgttattaaatacgttaatgaaatataacccgtttgcgaagaattaaatcctaattgttgttgataatacgtgttaataacgataagtgcaccacctgctacaccatttaataagaagtttgaaatagttgcaccactgtatcctctatttttaaaaattgaaaaatcaacaagtggatgctttattttattttcgtaatatacaaaaccaactaatgaacagataaacacaacaattaaacctagaattaacggtgaaactaaaccaaaatgagacgtctgtgtgatgattacatttaaacttaacatcgtcactactaaaatgactaaaccaataacgtcaaactttttagcttctgctttcatacctttgattggttctgctttagtctcaggtgcatgtttgattaagtacattgctaataatgttaatagaattgaaacaacaaatattgaacgccaacctatatatgtagccattaagccaccaaacaacgtacaaataccactaccaccccaagaaccaatagaccaatagcttaaggcacgttgtcttcttgtaccaatataatattcgttaataatagcaagtgttgatggcataatacatgctgcagacaaaccttgaattattctacctataattaaaaatgctggcaaaggtgtaatgatgatgagtaatgaacctacaacatttaatatcaatcctacataagtaattttgacgcgaccaaatttatcagcaacatcaccagcacctacgataaacaaaccagcaaataaggcagataagctaacagcgatatttatcgttccaacgtcactactatatgttgattgtaatgggacaacaagattaacaagtgactgcgcgaatagccaaaaggtaataacccctaaaacgatacccaaaagcaatcggttgtcacctctaaattgttttgatgtgtccatgaattagataagcctcctatgtttaagaaaaacaaatttttaatatgatatattaagaaacaatatcataaatttgcagaaaattataaataaaacatctcattttttagtatttttacaataattaacgctttttatccaaaaactttcatgataataattgctattttagtgtaaacgcatacaaacacaacctataaaaaggctactcaaagattatttgagctccttgagtagcctcattttttataaatcatgaaacgaaatcgctaaattataaacatcttctactattacatattaatactttgcggccgatgattagattgatttttacgatgtcgtgttgttgggtctaatcgtttttctaaaaatcttaatagtacatcaatgacgattgcaatgatagcaatcggaatcgcacctgctaaaataaacgttgtgccatccgtcgcatttgtaccacgaatcacaatgtcaccaagcgtaggtgctcctataaatgatccaacggcaacaacacctatcgcaacaaccaaggcaatacgaatgccaccgataataaccgaaacagataacggtaattcaatcattcgtagcacttgattgcgtgtcattcccatacctttgccagcatccttaatattcgcatcaacactagctataccagtataagtgttttttataattggaagtaacgcatataaaaacactgttaaaactactgtttctgaacctaagcccatgactaacattaaaatagctaacattgcaatgactggaactgtttgaattatatttgcaattgtaattacaaatccagaaagttttgtgtatcttgcaagcaagattcccaatggaataccaattaaagctgcaaacagcacaccatagacagacattaataagtgtttgaaaaataaatcccatagataaccaaagttcgtaacataataattgaataattgctgtaataaattaccttccattacttatgaccacctttctgtttatcaaaatagtggtgttttttcaaaaattcttctgcgacgacagcaggttctttacctttaccatccgcttcataattcaagcgttgcatctctgaagtcgaaatctttcctgtcaacttattaatcgtcgttttaagttctgggtgttgccgtaataattcatttgttgcaacagcactcgcagcataaggtgggaaaaattgtttatcatctttaagtactttcaaatcatacgccgcaattcgaccatctgtagaataacctaatgcaacgtctaacttctctgagtttaatgcgtcgtagactagacctatttgcattggtctcactgtaccaaagtcaaaaccatactcttttttaaatccttcatagccatcgcctttacgattcatccatgaactatccatacctaaacgtaaatctttactatgctttgctaaatctgaaactgtctctaaatgatattttttagcggtttccttcgttaccatgaatgcatacgtattcgcaaaaccatacgaatcaaaaaacgtttgatcaaatttctttttaaatccttgttgtgttgctatcattgctttcttaggatttttaattggtgcttccttcaaagctcccgttaaatctgtgccattatatctaacacctgatatattagcatccccattaattaaggcattatgttgaatcgtacttgaccctaaattatttactaatgttggctttatcttaccgtgtgtatcatgctctattaacaaccgtaacatatgtgaaataatttgcgattcgcttgttgataatgctgtaattttgacatcatttttcgtgctcttactacctagtccgggcaaactacatccagataatacggtaagcgataagacaaacacgacaagtatatatttaattttcttcattatcttagcctcctaattatccagatacttttaagcctttgggaactacccatttttcaactaaagctaataaggcatcaacacctaatgctagtgcagtaacgagtaccgttgcagttacaatcatcagtggatcatataaatttaaaccattgaaaatgaaatcacctaatccacccgcacctacataacttgcaagtgtagcccaactaattacatacacagatgacaaacgaatgccaccaatgataagcggcaatgctaacggcaattcaacatccttcatcaattgaaattgtgtcattcccatactttttccagcttctttaatgttgctatcaatattttgaacaccgagtaccgtgttatttaaaataggtaataatacataaataaatagcgctacaattgcaggcgttttaccaacaccaaaaatcggtatcataatagcaagtacagctagtgttggaatagtttgtaagacacctgccacagttaatacaatattggcagttcgctttgtttttgataataaaatgcctataggtactgcaacaatgatggcaagtaataatgccactatagaaatatagaaatgttccagtgttttcgacatcaactgtccaccatgttcatgtaggaactcaatcatgatttatcatctcctatgtcacgtactttgacattagtagtgtgttgctcatgcacttttgaggacgcagtgtcttcccccacatgttctgtttgcactgtatcctcactatcgccccaaatcgtgtcatatacaatatcaacaacattggcacgcgtaatcagtcctactaaacgctgttgatcatctacgacaggtacattcctaacgtttctttttaaaatcgtacgtacagaatcttgtaatttagaatcaatttgaacggtataaatatgttgttgcatggtgtctcgtaaacttttgtgtccacgtataccctgatttatatcttcaatgtctaagaaacctagtaaatggttattactatctactacaaaaatagtatcaacacgtttttgtctcataatatgaacggcgtcattcagtgttgcttctgcttgtatcgtgattggtttaatcattacaccttctacagtcttgtcattgggacggtcttgaatcagtctattttgtcctataaaatcacgtacaaaatcatttgcgggatgtcttaaaatattgtctggcgtatcaaattgcaccaccttaccttctgacataatacaaattttgtctgctaatttaatcgcttcatccatatcatgtgttacaaagataaacgtcttgcctaattttcgttgtaacgttttaactaaatcttgtaacgtatctctcgtaataggatccaatgcaccaaaaggttcatccattaaaataatatcttgttcggccgcaagtgctcttacaacaccgatacgttgttgttgcccacctgatagttctgctggataacgctctaaaaatgactccggtaaatccacaagtttaattaattcctttgcacgtttatccttttcctctttagtccatttcaacaatttgggtaccaacacaatattctctttaatcgtcatatgaggcattaagccaatttgttgaataacatagccaatatttctacgcaattcgacaggattcatactccgaacatctttaccatcaatttcaatttgtccttctgtcgcttcaatcatacggtttatcattcttaaagcagtcgttttgccacttccactggttccaataaatgcgataaattccccagattgaatatctaaagagatgtcatctactgcctttttattaccagaataaattttcgttaaatgcttaatacttaacataatcatttctccttcctcataaaaaatatgacgaatgatacgcataaaataaaaagaccattatcgcaattgttaaacaaatagagtcataagttaaacaagtacacatcatggtcttgattatgtagaattttatatttttcatctgtaatgtgaatacttaacagtaaacggcgctatgtatgttgaatttctaccgattactttgtttgcacattcgtatattcgacatttaaaactaacatactctatatgatgttattaaacattattattttatctttggcaactaaatagataactcatattttttaaaagcgaatttattatcgctcaattggttgttttatagcaaaaaagtgtcgaaaatgtgaaatattattacaaaagtcgaatttttgtaataatgcacacgcatccattgttacagacggacaaccgcccatccgccactcacaaagtcatccttatattttaatatcttcatcattcattgtagacacccttgccttttgctaacattttctactcccaagcctgtaacggaattccaacgtcaaagtgttgcccatgacagacacacctaaaaaaacaaccaacagcatgagccattggttgtttcgtgtcatcttgtatgttgttgtataaccggtatgctttactcattaattacttatcatgcatccctttaccttctagtatttggttaatatacttttcaacacgcttttgtcttgtttcactgcgtttagcttgtccaatatgatatatatattgatgttgtctgcctggcgttaatttataaaatgaagactctaactgtggcatttcttcgaacttagcttctaactctttaggaataacatattcctctgttttcttcatttcaacttttttaccagctttttcagctttaattgcttcggctagataatatttaatttcttcggtacgtgcttgaatctctgttaaattttcaaatcgtaactgacgagctgcttgcaccttttcagtctgttgaatgagtgtatgatatttatcctccaaaatggcacctttatgaaataatagtgcaacataatttttgaagccatggataagtactacatttttattattcaacgtgtaacaaggatgcatccatttatacgcttcctctaattctgtttcattaaagattaacgctctcaaatatttatattcttcttgccattgactctctttatttaaaaatgcttcaacttgttcatttgattgtttctcactcatagtcatcacttccattttgtttttcaatacacattgtattatatatcctaattttataaaaaactaattttacaaatgcttttgcgttcttacaaaaaatgcatttgactattattataataagcgtataattgtcgcatattattttttgtatttttggcaataacgaaggagtatttatgaataaagacaagcaattgcacaacgacaaaatcaatctatcccaattagtcttattagggttaggctctttaataggatctggttggctatttggtgcgtgggaagcatcatcaatagctggaccagcagcaatcatatcatgggttcttggattcctagtcattggaaccattgcctataactacattgaaatcggcacaatgtttcctcaatcaggtggcatgagtaactatgcccagtatacacatggctcattattaggctttattgctgcttgggcgaattgggtgtctttggtgacaataatacctatcgaagctgtgtcagctgttcaatatatgagttcttggccgtggcattgggcgaaaccaatgagatatttaatggaaaatggctctattagcacatacggattgctagctgtatatctcatcattgttattttttcattattaaactattggtccgtaaaacttttaacatcatttacgagtttaatttctgtatttaaattaggcgtacccatgttaaccatcatcatgttgatgctatcaggattcgacacttcaaattacggccattcggcaagcacatttatgccttacggaagtgcaccgatttttgctgcaacaacagcatcagggattattttttcattcaattcattccagacaattattaatatgggttcagaaattaaaaatcctgaaaaaaatatcgcaagaggcatcgctatctcactgtcaatcagtgcagtgttgtacatcattttacaaagtacgtttatcacttctatgcctcaatcaatgttacaacatagtggatggaatggcatcaacttcaattcaccatttgctgatttagctatcttattaggaattaattggctcgcaattttactatacattgaagcttttgtatcaccagtcggtactggcgtgtcatttgtcgccgttacaggtcgagttttacgagcaatggagaaaaatggacatatccctaaatttcttgggaagatgaatgaaaaatatcatatcccacgtgtagcaatcatctttaatgccatcattagtatgattatggttacattatttagagattggggtacgctagcagcagttatttctactgcaactttagtagcctatttaactggcccaacgacagtgattgcattaagaaaaatgggaccaacaatgactcgtccatttagagcaaaaattttaaaagtaatggcaccattatcatttgtattagcttcattagctatatattgggcaatgtggccaacaacggctgaagttattttaatcattatacttggattaccaatctacttcttctatgaatatcgtatgaattggcgtaatacaaagaaacaaattggtggtagcttatggattattgtatatttaatcgtgctatcaatactgtcatttataggaagcaaagaatttaaaggcttaaatatgattcactatccatttgactttatcgttattattattgtggcacttatcttctattacatcggtacaacgagttcatttgaaagcgtctatttccgtcgcgcaacacgaatcaatacgaagatgcgtgagtcactaaataatgaatcaaagtcatctcattaaatattttaaaatacagtgccatatatgatttcaacacacacacattaaccaaccattgatttcaacatcttggttggttttttattttgaaaatcggttataaataactaacataacaagatgatgatcaggctgggacataaatcaatgttctatgctctacgaagttatattggcagtagttgactgaacgaaaatgcgcttgtaacaagcttttttcgattctagtcaggggccccaacacagagaatttcgaaaagaaattctacaggcaatgcaagttggggtgggacgacgataaagaaatactttttctatagaaattagtatttcttatgcatgagttttactcatgtattcatatttttaagtacacattagctgtggctaatgtataagaaccactacataataaatcatttgtggctctttatcatttctgtcccactcccgtagaagtacatcatataatgctgaaaatggtttgagttaaaacagatatcaagctcgtctgattcagtcacaaaattgtcttgttatacttgtcacctatcatctatagaccgtggtatgattaaattggggatgataaaggaggttaataaatatgaagattaatactacaggtggtcaaattcatggtattacacaagatggtttagatatcttcttaggcattccttatgcagaaccaccagttcatgacaatcgctttaaacattctacgttaaaaacacaatggtcagagccaattgatgcaactgaaatacaacccatcccaccgcaaccagacaacaaattagaagattttttctcctcacaatctacaacttttactgaacatgaagactgtttatatctaaatatttggaaacaacataatgatcagacgaagaaacctgtcatcatttatttttatggtggtagttttgaaaatggtcatggtacagccgaactctatcaaccggcacatttagtacaaaataacgacattatcgttattacatgcaattatcgtttaggcgcattaggatatttagactggtcatattttaataaagattttcattccaataatggcctttcagatcaaatcaatgtcataaaatgggtgcatcaatttattgaatccttcggtggcgacgctaataacattactttaatgggtcagtctgcaggcagtatgagcattttgactttacttaaaatacctgacattgagccatacttccataaagtcgttctactaagtggcgcactacgattagacacccttgagagtgcacgcaataaagcacaacatttccaaaaaatgatgctcgattatttagatacagatgatgttacatcattatcgacaaatgatattcttatgctgatggcgaagctaaaacaatctcgaggaccttctaaagggcttgatttaatatatgcgcctattaaaacagattatatacaaaataattatccaacaacgaaaccaatttttgcatgttatacaaaagatgaaggcgatatttatattactagtgaacagaaaaaattatcgccgcaacgctttatcgacattatggaattaaatgatattcctttaaaatacgaagatgttcagacggcgaagcaacaatctttagcgattacacattgttatttcaaacagccgatgaagcaatttttacaacaactcaatatacaagattcaaacgcacaactatggcttgctgaatttgcatggcatgatacttctagcgcacactatcgcagtgcttaccatattctagatatggtattttggttcggaaacttacaaatattagcagcacatcaatatccaacaactgctcaccttaaatttttaagtcgacaaatgcaaaatgatttagctaattttgctaaaagcggtaaaatgccttggccgatgtatcataatgaacgtcgctattatcgcacatatcaataacgttatcgcatctaaaaaagcacacctgaatttgatagcaggcgtgcttttcatatgagaattatgatgatttaaatgttttagcataatgattatttttcaatgtgaaaacaacgattaatcctaatgcgccaatgatggcactcgtatatgtgatagcttgaacagaaacatgtgtcatgaccaagcctccaataatgcctccaacaccaataccagcgtttaaactagacatgttccaactcattacttggcttgtgtcgccttcaacatgttgaatcacaccgctttgcactgctggattagtactccattgcatgatattccaaataaatagtcctgctaacaatagacctgaaccaggtaagattaaattcataagtaacatcatgacgataaaaatagaaacagaaatcattaaccaacgcttacttgtaattttatcggagaatataccacctaatgatgttccaataacgccagcgattccatttactagaagtgctaatgaaacgaatgacatatcatgaccattagataaaataagtggatttataaagacgaatgtcactgagtttgcaatcaatactaaaaacgtaataattaaatattttgctacttcagcaggtcttaatattttcgaagtaacatgattttcatgagatggtgtctcatgattcacagggcctcgttgtatttcctgatccttcggtaaatagatcatcatcaagaagccaacaataatactcacaataattaagaatagaaatgtatagcgccaacctactaaatcgccgataaccgttccaattggtacaccaaaaacattagcaccactaaaccctgtatagacaagtccaatcattttaccacgatttttaggtgctgataacatcgctgtaatagctaatacttttacgataattagtgctgctgcagatgagataattctaccaactactaatattgaaaaatttggcgctacagcaataatgccattaccaatgataaatataagtaatgtccataataatacaggccttgatgaaaaacggttcgttaatttaaccagaataggtccacatatcgcaaatgttaaagcgtacattgtcactaattgaccaacgacagcttctgatacatgtaagtcctgactcatcaagttcataattcctgcaaccatcatttcaaccattcctacgataaaaatacttaaaatgaatgtaaatagtcgcatgattgacaatttaaaactcctttcaaacaaaatttccgatattcatttcccttagaataacgatttattaaaaaatgtgtgcaacacaattttatatataaccgttctattatataatattttgctttaattttctgtgcttaattggaaaattattgaaattgtttttcagtatttgaaaaattaacacaagtatgtcatttaataattatgtataattacttcagtttcaacaataactccaaaaaagcacgcacgctttatatgtcagaacagataactgactacaaagtatgcgtgcctttatgaatattttcgctgcgctaatgaatagcgatactatatgtgcgcgtcacttcatttccaattaaaactaatgcctaaatctgatgcagtaaaatctatcatgattcactcttaacatcagtatttcgtgctactaattgatgtcttgcattgaaaaattgaccatagcttaaatatgtcgcaatcaaagcagacataatggtcgcagttgtatgaataaacacgactaacaattgaaatttaatcgcttgtaaaggtggtacgccaccaataattaagcctgtcatcataccaggaatcgacacaagcccatatgttttaaccgaatcaatagttggcactatagctaaacgaatactttcacgtattgcacctttagaagccaatttaggtgtagctgcaagtgataatttagattcaatattagtactatcttgtacgaatgcacgatctaaattctggtaagctaaattaattgcaatcaagccattatttgcaagcatgccgccgataggtataacttcatttgcggtaaattgaatggcccctgtcgcaatagtacctgcaagcggtaatgccgttccaatgaagatagctagaaatgatatccaaaacacatgatgcatcactggtgatgctcgactaattgtattccatgatgcattaataataatgaccaatacacataaaataagcagccatttatcgtttattttaaaaatataatgcagcaaaaatcccaaaatgattaattgcacaactgctcgtaatgtcgcaacaattaaatctttaataatatgtaaaccttctttatatgaaatgataatcggaatgactaaaagcaatgccgtcaatccaagtgccgtattactcatgttgattcaactcctctgtattagaaatttgaccatcaacaattgttatacgcttttgaaagtgtcgcatactttggtcatcgctgtgggtaatccacataattgccacgccttgatctgctaatttaaaaatgatattttctatcttttctttattattaacgtctaatgcactggtcgattcatctaataaaagaatatccggtgtatacatcagttggcgcgctatagcaattctttgccgctcaccacccgacatattttccacttccgaacttaattgataatgtcccaaaccgacatctttaattaattgctttgcacgttttctatcaaatttatcattacgtgcaagtgatgggaatatcatgttatcttcaatcgtttcaccaaacaagtcactttgctgcatcaaataactgattcgttgacgcaattcttccgggtcataatcattatagggtttacctttaaaataaagttctccactagttggactaaacaaattacatatttgcttttgaaatgtacttttaccactacctgatggacctataatggcaatactctcgcctttatctacttttagactgatatgatctagtatgattctatcgctcgctttatacactaaatctttaatttctaacaacatttgcaccgctcctcatgtaatatatcaggtatattattcccgtttttttggtttttagtgcaattacatttaagaaaaaatcattttcttgtaatatcaaaatttagggataattgattttcagcatttaaattaaaaacaaaaaatcctattaacatggatactgtctaatgactaagaattaaaattagacaattgtttaacaacctaccatattaaaaggattctttattatttatggatttgattaccacatgatatttttataactttcatcattcaatgaacggacaatttcagtaacaagacggatagaattttcataatcatctacattgagcactgaaacattagaatgcatgtatcgcagcgtaacaccgattgtcatcgttggaataccttcatttgcgacatgaatacttcccgcatctgtacctccacctggtgtcgtatcccattgtacttcgatgttatgttccttagctacatctttaatatgctttcgcaaaccttggtgagcaatacttgtagcatccatcataatgacaactggaccaccgcctagtttactatcgctcgtttgacctgacatacctggggtatcataagcaatacctacatcgacagctatcgccaagtctggtttaatcgtattcgctgccactttcgcaccacgcaaaccaacttcttcttgcactgtggcatcactgtataagttaatgccaatattttcatcttttaaacgttttaatacctcaatagctaatgcacagccatagcgattatcaaatgctttcgcagttaaatatttatcatttgcaagcacttcaaattcactatatggcgtaaccatattgcctacttcaacgccagcttcttcagcttcttccttgctactaacaccaatatctataaacatatttttgatttccattggctttttacgttcttcaggcgttaagacatgtggcggtttagaaccgatgatacctctaatttctttgcccgaatctgttgtaatcgttactttttgagatagcatgacttgattccaccatccaccaactggcgtaaatgaaataaaaccatgtttatcaatctttgttaccataaaaccaacttcatccatatgaccagaaatcataattgagtattgaccattctcagcatttttctttccaaaaatgccacccaagttatcttcaataatttgatcactgacaggctctatatagttacgcattgcttctttaacttgcatttcataaccagcaatgccgtttacatctgttaaatgtttaagtaatttgactgactgattcatgttattcatcctcctgtatttcaacttaaaactattgtatcactaactttcagaaaaacgttccctaccgctttatcattttcaggcttaaatatttttaaaattttgtgaggaatccgcttaaaaacctcatatttctaaaatttaatattccgaaaaagtcacaatttaaaattccttattataatacgttattcttttattgttactaatttcaatctgtttagtcttgcgctattataaaattaaaaagtgtagagataacaacgcattaacgtcgctattttccctacacttaaatactagtttctttaattaacttatcattaaagttattcagatattgaatattcattaatcataatgtgaccatgccgatagtattaatacttctttatttcgatcatctacggtatagacgaccctgtgctgatggttaattcttcttgaatatcgctctaaatatttaggctctaatttttcaaaagattgtgttattttatacggatcattttttaaagtctcaacaatttctaaaaatgacttctttaaataagaatgttttattttctttaaatctgatttcgctgaatttttaatcttaaccgtgtaattgctcattaaagattatcccaatcaatatcatctatatttgttgtaccactattatctttttctctttctcttactttgtccattgtaccagtagattcaagatatattgtctcttgtatacttttccaatcttctaaacctataatcacagcattattttcggcattattgccactaatataaattggttcgtgattattattaacattttttagtaattgataaaaatcttttctcgcttctgtagggctagtgataatcatataaaccctcctttgttttctgttacgctaattatagcgtacgcacttgagtacgtcaatattaccaacgagttcatcgtattcttaatacctatatgctatcgttcacaaacttttgttcttttcttccaacataccgcctataatgctcaaaaagaaatcagcagtggaacacactacgttccctaccgctttatcattttcaggcttaaatatttttaaaattttgtgaggaatccgcttaaaaaaactcatatcttcaaaaaaaatgacaaaatttaaatttttgaataacatcattttttagtaaatgttataatttctttataatacaaatatcgaaagaaggcgactgactttgaaaaaattatgttcattaattgtagtagcattagtttgtatcattgcattatcagcttgtggtaaagaacaaaccaaaacatatgaaggtgatgttagtggtaaacatgtactaacttctatcacatataaagatgataaagttttaaaacagtctacaatcaacacaattaaatatgacgatctaggtatggataaagacgaagccaaaaagttattcgccaaatctgaaagtattttcaaagaccttaaaggcgtaaaatacaaagtagactataaagataaaaaagcaattgaacacttagacatagattacacagaagttgacatgaaaaaattaaataaacgtcttggtgtttcgactaaagaaaataaagatattagttttgaaaaacttgaaaagcaattaaagcacagaggtttaaaagaaaaagataaaatggacgacaaatagtttataacttaaaaatgccctcagataagactaaggttacaaaccttaattcatattctgagggctttaatatttgaagttcttgtgtgaccagcatccactactaatataaaattatttgcagtaacgctaaaatccgctgctttcaatttcccgaaataattaagttaactaatgagttttaatttataatcatgtatcgtttgtaactcaccatcgacttttcgatatacaatatgatcagcagtaatttctgtaggactggatacgccaacagctgctgcaatattgaataagccttcatgcaaacttgttacatagtttgtgacacgatattgcttttctccaacaatcaatgctttttctttcttcgcatctgtcgttgcaacacctacaggacacgtattcatgtgacattgttgactcattatacaaccgacactaatcatcatcccacgtgcgatatttacaaaatctgcacctaaacctagtgcaatcgcaattttatctggtgtcactaacttaccagatgccgccaatttcactttatctcgaataccatatttttctaacatgccagacacaataggtagagctgtaaatagcggtaagccaacaccatcttgtaattcttggaatgttgcaccagtaccaccttcaccaccatcaccaccatcaatcgtaataaagcttggatacttatctagttccaccatcgtacgtacaagtgtttcaatttctgaaactttgcttactacaattttgaatcctactggtttttgacctaattgctgcaactgatcgacgaaacgaatcaaatcttcagcattatgaataaattcgtaacggttaggtgaattgattgttttataaggttcaacatttcggattttagcaatttcttcgtttaccttttcagcttccatatgaccaccacgagtcttagcaccttgtgccaacttcagctcaaatgcgcgtacgttagataactgtgcaacctctttaaataaaccttcactaaaattaccttctttatcacgaacaccaaataaaccgggaccaatttggaaaatgatatccccattaccttttaaatgatattctgataagccaccttcacctgtattcatccaagtgcccgctttagctagacctttagataaagctgtaatggcattttttcctaaagcgccataactcataccagattgtcctacgatacgttttaaaataaatggatgttttaaatgttcacctaattttattgcatggtcatcacttaagtaatacggatcaatctttgtcggcacacgatattcttcacgactaaataaacgctcattcgcgattttataaatgaatgttgataacaatgttgtattatctactgaaatctcattacgttgcatcggaaacattgtgttctgtatgtaaaagccgtcttgataatctttagtagtaccgaagctggtcatacgagagttatattttccagccaaaacgatatttttataatcattacgtgaaaaaggtttcccttcattatccccagaaaataaatactgacgtaattccggtcccattttttctgaaatatatctaatacgtgctagtaaaggataattccttaatacactatgttgtgattgtcttttatctttaattaaccaaataagcccgataacaataaccgtaagcatgaatcctacaacgataatgttaactataaattgcatgactgtaagaaacgtcattacaatacctccccccaaaatttcaattcaatatttatgatacaccttacaaaacaaaacacaatggaagcgcttcattttataaaacaattttatgatatgtttttcattttaaattttaatgtataaaacatacaatacaaagtaatatgtgctaaagtatctatataatacaactatttaagaggtatactatgtcaaatacaaataaacattacatagaagaagaatacgctaccgaacaatcgcgttttttcaaacgtgatattggatttattttcctttacatatttttggttaacatcttgccgatcattatcgtctttttaacttttgggttagtagctgtattcactcaacaagctccgtggggtttctcttttcctatttcaatgaacattagctatttactcgcagttattatttcactagctatttttcgtctgatgcatgaagatgcgtttattccaatgatacgttcgcaaatcgttgctagtgctaaatataaatggcatattcttatatcatttacactaagtgtcgtactctttttacttttaaatcatttcaatattttcgcactaaatgtagattcctttactgtctttgacatttacccgctcattaaagggtatggttccatcagtttaatagctatattttcgttaaccattatattaaatactttgatttgtcaacttattttccgtcatattttaattcaagaattaagcagattaatacctttaaagattacaatagtattgtccattatccttgaaactctgttctactatccatacattaatacatggtgggaattcattccagcattgatactagcaggtagtgcgacttacttatatttaaaattataccgtaattttatggtgagctatttctatcaattagcagttatactcgttttgcatattttcatgtaaaatttttcagagtattatccattatccatacacatcaaaaagcacacttaaaagtcagtatcaaaactcacttttaagcgtgctttatttagatatactgtcgttctaaaaacgagccatatagaatgtttcatgtcctagcatgaagcacatgaatcgccatgctcaatataccttttaaaatttaaatattcattaacttaatatgctttaattcacttcattaaagactactcgctggacgtggtgttggctttttcaagaaactcataatcattattacaatgactaacataccacaaattagatacatccatttaaatcctactaaatcggaaataggtcccatcaatgcgccacctaacgatatacctaagtctgcacaggcaataaataaacctaacaacatattacgacctacttttggtaagacgaagcttaagtatgatgttaatgttgggtacaccattgcttgcgtcattcctattaatatcgcactaccatagaaaataattgcacctacttgcggaccaaatgccactacaaatgacgcgattactaataatgatagtacagataccatatatttaggatgccacataccatctgacggaatgtatttccttaagtaaaatcttgccgcaacaactgcgatggcctgtattgtcaaaaagattcccgcattcgcgaatcctaaactcactgtgtataacggtacaaatgtactaactgcaccaaatacaatcgatgcaacaatcatgataataccactgttcaacaactctttatttttgaaaaattgcgcaaaaacagttacagcgttaaacggcattttttcaatcttatctgacgtatcgggttcctgttcagcaaaggtcacgcgatagccaaagaatgttgttgttaatgcgataaagataatgacaattgcaaatagtgaaatattatttgcattccaaatacctacggcaactaatggtccgattaagtttggaatcgttgaaaatagcgagtacaatgatacaccttcagaacgatgttcctctggtaatgcatcaataatacctagctgtaaagacatagaaaagaatgccgtacacacaccttgcataacacgtgctacgaaataaccttctaagccagtaaaaccataaataattaaagctatggcattgataatcaaaataattcttaatactttaatgggaccgacacgagcaataatttgtcctgcccatggtcgaaataccattgctgttaacatgtatgcccccataacgataccgataaccgtattcgttgcgcctaaatcatgccctcgtaaaggtataaacacgtttaagattgcattggcactaaagaacatcaatgttaatatatataatctcaaaaaagggccaagccattgcacctttcattatctcactccttagaatgatagttgtttttctattaattctcttgtataagcattgtcacttttatgcaatgcgcttgtcggaatttgttcttctatttttccgtttttaaaaataattaattgatcacataaatacgtggcagcttgaatatcatgtgtgataaaaatataactcaactgacgcgtttcacgtaaatgaatcaataaatctaatatttgtgtttgaattgacatgtcgagtgaactaatggcttcatcaaacaaaatatatttagggttaatacatattgcacgcgcaatcgcaacacgttgcgcctctccacctgataatatattaggatatttatccatgtatgccttagatagaccgacttcttccaacaatgtaattgcttggacttccataacttctttaggttgtccatcacattgacacatcacttcaaataagatttctctaacagtctgaaatggatgtaatgatgacgtataatcttgaaatacagcaccaatttgatgacgtctcactttcttcttatgcatcggttgatcatttaaggttacacaacctttatccggtttctcaatacctaatatcatacgactcaacgtcgatttaccgctaccactttctccgataatcgcaatcgtcgcaccgattggacactcaaatgacacacctttcacgataggtgttcgacgacgcttaaaaacatgtgcgctttgatatgacttttcaacatctttaattttaatcatgtacatcacccctcatcacatgtttaaaatgatcattaatcttcttcttcgttgataataaatacttcgtataaacatgttctggatgatgcaagactgattcacgtgtcccttgttcaataagctgaccatttttcatcacaacaacacggtctgcaatcttgttaataaccgttaaatcatgtgaaatgaaaatcatcgcacagtcaaagtgttttttaatatctataaatgcttccagtacatcatattgtgtaattgtatctaaagccgttgtcggctcatcagcaatgattaactttggtttcaaagctaacgctaaagcaatcatcaatcgctgtaacattcctcctgataacatgtaagggtatgattttaatatacgtttaggatctttcaaacttaaataatccatatattcaatcaatgtcttttcaatttcttgtgtagacattgacgtatgtactttcatagtctcaaacatttgtttaccgacagtagttgatgggtcaaaggcacgactaccttgttgcatgaccatcgcaatgtctttaccacggtactttttcaattgcgattcagataatgacaacattgatgtaccatcaaagataatttcacctgtcaccccgagtcgttcgggattcaaaccaataatcgatttacaagtgattgatttaccactaccactttctccaataacgcctaaagtttcacccttagttaatgtaaaattcacatcactcacgagtggttgatctgtccaggtatctgtaatcgtcaaatgtttaactgttaacaatgtcatgattgcaccactccttttttcacagaacgaagtttatctttagaagagatgcggggatcaatagcaatttgtaaagcatcggataagaagttaaatgccatcactataatcactatggcaatacctggcgcaaacatcatttcaggatgtgtaaacatcacttttctagcttcgttaagcatcatgccccactctgcagtaggcgctttgacacctaatcctaaaaatgaaaagccagatatttgcaagatcattgaacacatcgagctactagagatgatagcaatatctgctaatgttaatggcataatatgtttgtgaataattttcatatcattcataccgattgttttagcaaatcttacatggtcagaagcagtgtactgcataacacttgtacgtataacacgacagaaccatgcccaacgcgtcaaaataaatgccatgataatattttcggcacccattccaaacaatgcaattaatgctaacgttacaacataacttgggaatgccaacataacatcacacgcacgcatgattaaggcgtcaacaaacccttggaaatatcctgataagaatcctaaaatagatccaataagtacagaaacaaatagcgcaacaaagacatataacaaacttggtctaatcgcataaattaacctagttaaaatatctctacctaaatggtcagtacctagtagatgttgaaaactcatgccagcaaatttgtttgctgtatcgatatggttaggatcataaaatgtcacaagtggtgctgctaatcctaaaaagacatataatacaataatgcctaaagcaattactgcacctttatcttgtaataatcgttttaaaattatcatcgtgcgccctcccttaatcttggatttaatagcgcattaatgatatctgctaatgtattaaatacaataaataataccgctacaattaatacatatgcttgaatgactggaaaatcgtgttcaagtattgcttttaaacttaattgacctagtccaggccatgcaaagatatactcgataacaactagtccacccattatcattggtatagacatacaaaagattgataccgcaacttgtaaagcattacgcaacacatgcaacattaatgtgatagatttcacaccgcttgctcttaaataaagtacataatcttcatttaattgttccaccatcgagcgtctaacatttctaaagtaaataccagcataggcaatcgtaataacgatcactggcaatatgtaactttctggacctgttaatccagaagtcggcaatatgtttaacttcactgaaacgtaaataataagtattgaagctatccaatatgatggtaatgcagttagaaagaaagccactgaacgtatcgcacgatcagtgaactttcctctttttaatgcactaactacacctaaaataattgatgtaatcatcaccataacacttgaaattattgttaatttcaatgtattcataaatgctggaccaatacgttcagcaactgggtcacctgtaatgtagcttgtaccaaaattaaattgcatcgcttcaagtaaccaatttttatattgaattaataatggatcattgaaaccgtacttctcattcgtttctgcaatcaactctggtgttacatttggcgtcccttgtgcatgtaaaattgtcacagctggattttcatttgtaatatacgtcaatagaaatgtcataaaacttactacaatcatcaatggaaacatgagcgcaatacgttttaagataaatttgaacatctaattgctcctttatttatactgcatttcattgaatggtaattcatactgtgattgtgtgaatgatactttttctaaatcttttggtgcaacaactgtcatactaccgtgtgaaatagggataaagataccttcatcatcaatttgtttcaaaatgtttttataagcgtctgaacgctctttaccgttttggattttaaatgcgtcatcaatgctgttgtatattttatctttgttctcaatgcctgatgttgcactttcataaccatttttcgctttaaatgctgcaatagtactttgtggatcgtacaataatccccaagtttggttgaacattaagtcataatcaccagaagtacgacgttcagcaattttatctgatgtttcgccattgatgtttaacttaatacccattttcttaaattctgcttgtaagtattctgcttgttctttttgacttgaagaacctttgtcatagtacattgccatttcaaggtttttaccatctttttgacgaacatcgctgtctttacctttcttccaaccagcttcatctaataatgattctgcttttttaaggtcatacttacgtgttggcatatcgaaattaatgtctgttacatttttcgcaaataattgagttgctggtttttcttgaccatctaaaatttctttggcaattttatctctgtttaccatatgaccaatcgcttgtctgactgttttgtcactcacagcgttatcttttttaccagaattgacaactaacattttcgtattcataggttgactacgcttaacttgatagtcacctgtatctttcaattgttttaaagagtctttgtctaagctatctgtacctctatcatctgtgaaggcaaagttcgtttcaccttttttcattgataggaatgctgtttcaccagcaggcattacttttgcttgtactttgttaagtttagacttttcgccccagtattgatcatttttgttaaagtctgcagactcatcttttttgtgttcacctaatttaaatggaccagtaccatcgaactttttaacgccatcttttgttgtaccgtttttaaagtcttttggagacacaaatacatatggacgaggcatcgctaattcagccaatgcaggttgatatgcttctttcaaattcaattcaaccgtgtacttatctttaactttaacattgtcaattaatgtcgaaatctttaaccaagaatgcaattttttgttttcttgaactgcgtcaatatttttcttaactgcgtcagcatcaaatggcgtaccatcatggaatttaacgtcatctctcaaatggaacgtgtatgtcttcccatcttcagacacatcccactttttagctagtaaaggcttaataccatctttcgtgttacgtacaagcggctcgtatatcatactttcagcagacattgatccaccgtaaacatgcggattcatatcaccgatatctttaaccgtcgtatacgttaattgcttgttttcttttttctcctctaaacctttattaccgccacaaccagttaaaattagccctgatgcaagtaacattgcactcattttagttagttttctcatttgcttttcctctttctaaattgataagttgcattacttaatcaaatcgtaatgattatttttctcaattatttgcttatttttatgtaaatgtcaaacataattcaataatttttttctattataaaacttcaaacccttattatgaaagcgttctattgatttccaaaaattttgtgacgagtgctttatctccttcaaatagatttgtattaaattgagaagataagtgttgatcttgatgcatatccttgtacgcctggcaacttgcttcatagcgagttaggaactgatcaatcattggcgttttgatacctagcattttcccaatatgctgaatcatcgccgttctgtaataatcttcacttggcattcttggaatttgaacaacatcctgttcatttttatagacttgcttaaatggtacagctgaaaaatcaaagtaatgtccgttttcgtctggctgtgaaaatggatcaatgaggattgcggtatatcttacataaagcagatattcttgtaagatatctggcaagatttcgaaatgctcaatatcaccttcatccaaagtttcaggacgtactggataattttccttcaccataaattgaagcaggttgactgacggcactctaaatgcttgtaaaataaccatcatttccttccacattaaacgcatttcacggattagtgtcatcgttatcggtccttcaggaaataacttatacacataaaccggtacatctgttccttcgaaaatggctttcaatgaaaagtcattcataaatagtggtgggtgcacataaagcgaactgtttcgcgtttcagcatgcagtggcgattcaacgacttctaattgaatcttcaattgctcagctaaagcagagattcgttgacacattgttgagtttgaatgtgtcgatcccatgtacaatttcttttttacacctgttgtcaacacatgattaggcgcttctttatcaacaatacgtgtatcgccaagataagttgagaatgaaatcacttcgatatctttattaaatttagacataaattgttcgacaatcatttgcgaaccaaatgtcggtgatattaaaatgacatgtttgacactttgcaaagtttctaacgacaattgctgtagtgtgtcataataagcatctgctgtgcatgccatgacaaccgtttcgtattcacccttaacgtttttaacatctttatacaaacgattaatttcaaacttaccttccagatgttgatgcgcctcgttttgtattttgacttcaaattgtttcgcttttttatacgcttgatataagcgttttgatttttctgatgttgaggcacgtccaaccatatcaatctcataatctgattttaaatagcaaatattcgctaattggattgcgaccggaccagtgcctatcattaataatttagacatccgtaatacctacctttatagctgcttttttataaagtgctatatcaaaaatttgctgtggtctcatatgtttattcacacattgccacttatcttccgctgtttcttgtgacggataattaaatattgctttgatgccatcaccaaagcgcattgcaactacgacattttcatttgttaaatcatataattcttctaaaatgctgtactttaaaggaattgtcgagctgaatatgatatgcgtcacatctttgatatctttaagttcagataccttttgatccgtaattgttatatcttcatttggtgctaagacgttaacgattctgcgccctaggtcaacggcttgtggatcaatatcaataccgataactgaagcacctgtttcttttgctacttgaattaacgtcattggatatgcacctgaaccaactaacaataatttgtcattgctagctatactacattgtccaaactcttcatcaatacaatgttctatattgtcaaagtaacctgtggtagacgcctgtccgtctaatagacgtctcgctctaatgacttccacttgtttaacacactgcgctgtaatatattgcagtgattttattaattgtgctttttcttcaacgtcacgccaagcattaaattgttgttcataaataggatttaaaataaattcactatagtcatccatcaatgtttctaatgcttcgatatattgatcgtcttgtaatacacgctcgtaatgcgcttcaaacttttctaaatattgttgtaatatcaatttgatttcattattaaagttattcattgtaggctccttattctatatatgcttttcctgtagctacagttgtaacctgtcctttaattgaagtttgatatcccaattgatgacatcgctttgatgtcactaaaatactgccccctggctgatgtactgtaaaatctttgcatgcgtcattacgttgataattattaaaaaccccaattgatgctgtaccagaaccacagctattttcccaaattaaactttgaatttctggtatatagattaatggctgtaaaaattgacgttgttcatcaaaaagcatcatacctactgttttatatttgtgactccattgttgctcacgcacaaacgcttcaaccaaatgttgaatttctgttgttacttgtttaactggaatcacataatgtacatatgtttcataaataatttctattgctttccatgaatgattacccatattaattgttgttggcacaacacgatgggcttgtggcatttgaacttcatagtattggcaatcatgaattgcgcattgcactaaatccgaacagccagacaccttcaccttaaactgttggtctttaagcaaatgactttcctgcaaatgatgtatatatgacatcgtcgcattaccgcaaaattcattaccgctcataactaagtgaaaatcattaccatcatcattttgtgttgattctataaagcctacctgttcacagcatacatgtgttgcggccatcaactgattggcgatagatgcatattcactagcatcatgttttgaatgaacaagtatcgtcatattccccgaaggattatacttagaaaattctataacctgccgattcatacgacactcctttagatgtatttttagagcctctgtaattttaattactagaggctcttatgcagttgttgcgaagcaaacaactgtattcctctaaacctgtaattttttagaagatgaacctaatagctctatctagtaggtaagtcatgctaattcgcaaaagcgaaaaccatggctcttatgcagttgttgcgaagcaagcaactgtattcctctaaaactgtaattttttagaagctgaacctaatagctctatctattaggtaagtcatgctaacccgcaaagtggaaagcatgacttagtaatcggttgttgtatcaaaatgcaaccgtaaaccttatttaaagttgcttcttgtggctctacaagcgaatgcagttgtccgttaactacattcacttagatgcttttactgttttcacctcaactaaaacttcaaaaaagttgcagaaaacaaatcgtaactattacgatttgattatatactatattagttgagaatcattgtcaataaaggttgtaaatgaatgcacatttatattttgataatccttccataaacttcgtattctcagcacattcaagtctttttgaaaatttttatcaataattgagtagaagttccgttctagtcagttcaaaattttacgtaagttgtctctgcgtattgctttagtgagaataacccacacttgtggaaacgtccttttgttaatctacaatggatacccttgtctttcgctaacatttcctattaccaatcctgtaacggattttcatcgtcaagttgttgcccatacaatacgcaccaaaaaagctttgtacaatttcgtacaaagctttaaaaatttaaataaaaatatcattgttttaatgaactagccatatcagattttatttcgtttgctaatacttgtaattcagggaagtaattattagcaaagccaattattattttattttttacaaacgtgttaatctctcgatcttctggaatcgtattttctattaaattcaaaagctcactatgacttatgttctctatacttactgtatttaaatattttaaaatcacaagatacaattcatcaaatacttcatgttcaaaatcaaagtccaataataataaactaacggaattagtttctaactgattatctccaattttatctgcaatctctcttatagcttgatatagcaatctaaaactttctttttcttttaacataaaattctccttaatttattagaatagacaaaatacagcttattttaaagatactccaaaagtttgaactcgagattctgataaattagatgcacgacctacaatacgttaaaacaagctttaagcaatacacttcaaatgaacaatatgtgattttcaaagattaattaatctccgctttaaatgtctttcattgcgacaatatgcatacattgcctacttcatgccaaattcttttccactggatatcgattttaaataattattccaatgtccgcttccacgaatcatcacttaacatctcgccaggccatgtgtaagccatcacaccaccatcaattcgaatcgtctctccagttatgaatgaactgtcgtcagatgctaagaagactactaatttagcaacttcttctggtttacctaaacgtcccagcggagtcatccatttttgattttctctaaatgttttacctgcatcatcctcactcgtacctgtcagtttatctactaacggggtttcaattgtacctggtgcaatcgcattggctcgaatgctatcacggccatactcaattgcgattgattttgtaaaattaatcactgcacctttcgcagcattatatccagagcgatacaagtctgctgcttgtccggaaaatgaagacgtattaacaatagagccaccttgattcatcattaaaggtaacatcattttcgtcattaaaaatgtcccacgcatatctacattcataatcttgtcatacacatctattggatactcatgaattctatcagccgcattatccacaccggcattattaaacaacacatcgattcttccaaactgttcctttatgtcagacacaaagtctaccacttgttgttcgcttgcattatccacattatacgccttcgcattgtcaccattacttttaattttatcgacagtctccgataccgcttcagctatgtctaccgccaatacatacgcaccttattgagctaaagcgattgcagaagcttgaccgatacctgtacttgctcctgttacgactgctactttattttccaaacgtttcattcagtcactcctatacaacatatcttaaacttacagtccttattttccactgttcgatgcttcataaacctaatagataagtcttcaggcagtcttaactactctgctatacactttctattgaataactcaaaatatttaacaatattagtttttttattttctgaaaattgttacttttgagagtattttttgttacactttaaatatttaacaaaggggggaataattgatgacatcaaaacatcaacaaaaggggtctatcgtcaatcgtttcttgaatagtgttgaaaaaatcggaaataaattgccagatcctagcgtcttattctttttaatgtgtgtgggcttagccattatgacatgggttatctcattatttaatgtatctgttaagcatccaggtacgcatcaaaccatttatattaaaaatataattagccatgatggatttacgatgataatgaatgatacgattaaaaatttctcagagttcccagcattaggcttagtactagcagtgatgattggtattggtgttgcagagaaaacaggatacttcgataagttaatgatttctgttgtgaatcgcgcaccacgtttcttaattttaccgactattatattaattggtattttaggtagtacagccggcgatgctgcgacaattatcttgccgccgcttgcagcaatgctttttattaaaattggctatcaccctatcgctggactaacgatggcatatgcttccgctgttggaggatttgcagcaaatatagttgttggtatgcaagatgctttggtctattcatttacagaaccggcaacacgtatcgtttcagattctattaaaacaaacgttgctatgaactggtactttatcgcagcgagtgtcgttgtattacttcctacgatattgctagttacaactaagctcattattcctagattaggaaaatatgatgacagtttaatgcatgatgaccatgaagaaacatcttcacatattactgacaaagaagcacatgctttaaaatgggcaaatatcagtttcatagtcacaattattttattaattattacagccattcctgaacatagctttttaagaaatgctaaaacaggcagcttactagacgatgcgccattaattaacggtgtcggattaattattcttgtcgtatttttagtacctggattagtttatgggattttaagcaaagaaattaaaaatacaaaagacttaggtaaaatgttcggcgatgctgtaggatcaatgggaacatttatcgttattgtgttttttgcagcacagctacttgcgtatttaaagtggagtaatttaggaattatcgctgctgttaaaggtgccaaattattagaacatcaaaacggtattgtattgatactaggtattattgtactgagtgcaatggtcaacatgttaatcggaagcgcatcggctaaatggggtattttaggaccgatattcgtaccaatgttaatccttatcggctttcatcccgcattcacacaagtcatttaccgtgtaggcgattcaattaccaatccaattacaccgatgatgccgtacttacctttattattaacttatgcacaaaaatacgataaacgcatgaaactcggagccttactttctagtttaatgccgtattcaatcgcgctaagtattgtatggacagtatttgtcatcatttggttcctattaggtatccctgttggaccaggtggaccgatattcgttaaataacagtattcaaagggataaattaaaatgccactatacaagatttgacctgtatagtggcatgatttgttatgatatagcgttcgagatgaaactctgcatttatatgaacaattatagtctatcactaataatatttaatctgttccaaccgttaatttggtttacaacaaagacaagatcaataatttgttcttcatcataaaatgattttagccggtcaataatttcaaacttcttaaagtctttgattgaatttaacatttctgcaaattcaagcgtcactttttcttgatcagtaaataaatctaaatgtctaaaactcaagacttcatcaattttcatttgtgttacacccaattcctttaattcttttttatggatatcaacacaataatgacaaccgttaattttagaaattaataacttaatcaatgcactaagttcatcattaatgggtgattgatgaataaacttttcaccttggctcattacagacattaactctccattttgtttcttgtaattatacggcatttgcaatctctcctttacattgtttaataccaatccagtgatactacacttcgaacaatattggatagaatttgaaattctgtataacatcttgtcaatctatgctttagttaaaacatttagcacttatatttaaaaaatatataaaatatgaaaacagattgaaaggatattataccttgctctacccttttttataaaaaatcacacacatttgagaaaatttgataatgtcaataaatcacgtcatcgacattgttattcgatatatattgttcttataatggccaaactattattccatttaaattaacgtggttcgtttgtgttaatgtactgtacaaaactggggaagtattggtgatgatgaagtgatttatattaattgcgaaacaccttcgatagcaatgacatagattattggaagattaaatcaaaaataaagaagaccctagtggccttcttttttatctaattcttctttgattttttctggtgattttctttcatgtgctggttttaataatttatctactccttcactttttatcatagcgccaccaaattgataattatgttcaggcgatgcataagcagtaaaatcatcttctttattttcattgatgtatccttcaatcacagcacttcccataggacttgtttccaagtttgtgaaatgtacagatttaatcgtgttcgtttctttagtattatgcttaagatagagtgtaatacgttcttgttgttctttgtagtaaatcgctttttgtttttctttttcatcatatttcattttaaaatgcatgaccgtagaaactgtacatatacacaatatgacaccaataattataaaaacatgttttttggacattaaagtaactcctaactttagtgactcttctttttatttagttctttttttatatcatctggtgattttaactgattggctggctttagtaactcgcttaatttttcactttctatcatagcaccaccaaattgataattatgttctggtgtagcataagcagtaaaattatcttttttgttttcatttatgtaaccttcaatcacagcacttcccataggacttgtttccgagtttgtgaaatgtacagatttgattgtattcggttctttagtgttatgcttgagataaagtgtaatgcgcgcttgttgttctttatagtatattgctttttgtttttctttttcgtcatatttcacttttaaatagatacctgcaacactaattaatatgattaacataatactagttaatattaaaattttctttttcgacatctatcaccagctcctaaaatgtggtggaattttatacagtttacatatttatgatactacaaaacacactcttacaaagaaaatctataattttaatctaggtcaaggaaaagcagccaaaagtgtttatataagatcaacgaaatattgcgggtataaagtggttaacagataaatacagtggaaattgtactaaaaattcaacttttcatttttatatgtaagtatgattaacttgaaaacaaaattaaaacggccgcatagttttagcggtcgttctttttagactctaattccttttttatctcatcaggtgatttggtttgatgtactggttttaataacgtgcttaaatttttacttttgattaaacttccaccaaattgataattatgttctggagacccatatgcaacaaaatcatcttctttattttcatttatgtaaccttcaattactgcatcgcccataggtcctctttttaaacttgtgaaatgtacagttttgatggtattgggttctttagtattatgcttaagatagagtgtaatacgctcctgttgttctttatagtatattgctttttgtttttctttttcgtaatatttcacttttaaataaatgactgatgcaactatacatatacataaaatgacaccaataattataaaaacatgttttttgttcattaaagtaactcctaaaatgtggtggaaaatgaaaaaatttttataatctataattatgaacattacagattataaaccataacactaacatcgtcgccttcattaacttgattgttaaaatcagcaattactgagaattgtacaaggaataattgcctattatgccctcatgtaattattgccttactaacattaacaaaatcgatagctattacattaaatgcctataccccagacctcaaacacctttttatacaggacgcactgtaatttcattcacgttaacgtgctttggttgtgttaatgcatataatactgcttctgcaatatcttgtggttcaagttttttacgatctgttggattgtatgcggcagttatggctgtatctaccattcctggagaaatgcttgttactttaacgcctgtctttgccaactctttttctaatccttgagtaatagtgtgaactgctgctttcgtcgcactataaatcgtactacttttcgttacttcaaagccagaaatagatgcaatgttaataagatggccacttgattgttctaacatagttggtaatgcagcctgtgccgtatataaagtgcctttgatattcacatcaatcatactatcccactcatctacttgataatcagtaatcttagacgacaacatttgccccgcactattgataacaatatccaaaccaccgaatgtttgttgtgcaatttttatcaattcatcgacttcttctttattcgttacatctgttggcactaccttcacactatcttgtgacaattgattcgctacgttttgtaatttttctttatttctacctgctaagacaacttttgccccttcttcatgtagtaatgttgcaattgcttctccaataccactacctgcacctgtaactactgctactttatctgttaatactgtcataatgatcgactcctttgattctttttattttttcagggtaaatcataaatacatattacttttaaaaagcgtatcacaattcatataacggtcataataactcgcttcattttcatagataaattacattacaagccattcgaaacatacaattaatcgttgcttatattttttatttttaaaaatgttgaaaaatcgtcacttctttattgtaaaaacattatattagtaataaagttaatactgtgatttatcattcgattgaatgattagagggaggaataaaacgtgacatatcatgagcgtgttttagcattaagagcagaaagtaaaagaaccgcatttgattttcgattcgaagatttatttagcaaagaagaatggctaagtatgtctcttgcagaaagacaaaaagctgaaaaagcatttcgacacgaagttaaaaatatggacgatgtaagaatgcccttctcaagtgtccatgacgcccaagtaaaattatataatgttgtatattcttataacggcattaaacgtaattttaaacaagttgaaaatgaaggattctaatatcatttcgtttatatatagcagacatgatagaattttatatgtaaatcttgtaggtaatcgttttaaaaataatataagtatgactaaagccacatccaatataggacgtggcttttagtatcgttccagatttgtggggagttagggtttacttaattaaaggggtctgccctcaattgctcaccaacgagggcaagttacatcaatcacacttcaattgccgccgactaggggtagtaatcattggcaataagaactagttagtgactaacgatttacgttccatagcaaagtgatacaaacgctcagcatcaatgtaaggcatagaatcaatagttaggtaaccatctttgatgtcaccaattaatccttgatttacaccagtgttcacgtaaatatcatagctacttacgtctgagaaaataagcgcttcaatctcttttctcataatcatcactccaatgtttatatagtatttatataaactctctcgtctctctctatttattaacttcttacaagtctaatattacatgaatttccaaataaataaagggatttgtgatgtatttcacaaatttatcactattttggaaaattaagaaatatttaattatataaaagtttaataagtcagaaaatatgataaaatgtagatgttctttagacattaaaagcttctaacatgatacggaatatgaggttcctgtatcacattagaagcttttttgttgcggtgcttatattaataatggcatgaatgaacgcatgctgtcttagctccaagaatcatataagctattaaacttccgttctttgaatattttttaatttcttactaatatcatccagttcattcttcgcctttttaacccaatctccttgagctacattatcaaattcacctttaaattttttgaaatggctacctatatttcacagctcactttagatatcgaacttgtttcttcagagttacttgttatattaccaggttttatttgatattcagtttgactcataccttgtatcctcacttggagtatattgtacagaatctgtaaaataaatgttttcttctttattttcgacaaaggtaaattcaagacttctagaacctacggatgaaccttttaaatctccatcgcctttcaataatagtttcggcgcttgtttggttggaatatcatatctttttcttaactgttggacattataatcatcattattcaattgatattttgccgaataacttggtacattaggattatatgaaatatcaccatctttataatcattaatatctttaaagttgccatattgtacaaagaacttaaagttttcaatctctttttttaacttgtcattcggtagtggcttcgttggtatgattttattatgttccatttttaccggataccttttttcatcatcctttggtctgccgttactgtcatctgtcatttcacttataaaataatacccttttgtggttctagtattgcgattgatatagagcaccattcctctcgtttccatatccttaccttttggctcgattaccatttcagaattaactatccaagtacctttatcaccctttttaaattcttgatctcgaaagccttctttatcgtaaaaatcatcgagatttttggttggatataattttaatgtttgattaaatgtgtctttaatttgggcgtttcgaccatttgtttttgtcataatgacataacctacaatcaatataatgagtaataccaagcatataccgagcgttaatttctttgaatgaatcatcatttctccaccttatatttttaatattgactcagtttttaatatttacaactaaagcgaaaaattattttgaacactttatgaaatttttatttcaaacttctattaaccctattcagtaggtttgaaattaatactatccgtaaaatagatgttttcttctttattttctataaatgtaaactctaaatttttgtgtcctatagatgatccttttaaatcaccatcgccttttattaataatttaggtgctttcttagttggtatatcatacctctttctaagttgcttcacattgtagtcatcattacttaattgatactttgctgaataacttggcacattcggattatatgaaatgtcaccatctttataatcattaatatctttaaagtcaccgtattgtacaaagaatttaaagttttcgatttcttttcttaatttatcatcagctatcggtttggttgggataattttattatgttccatttttactggatattctttttctttactacgtgagtatccttttttatcttcccataattccctcacaataaattcaccttttgtcgttctggtattgcggtctacatacaggaccaatcctctggattccatattctttccatttgtttctattgtcattttagagtgaattatccaagtgcctttgtcgcccttttcaaactcttgatctcgaaagccttccttatcataaaagtcttcaagatttttagttggatacaggctcaacgttttgttgaagttttctttaatttgtttatctttactgctttcttcctttttcattccgcaagcccctataaaaacagctaataatactaaatacagccagagcctcaacctttttgagtgaatcatcatttcacatccccatttttatttttgatgcaaagttaagttcaaattccaatattaataatattagaggaaattttatgattaaatcctcgtggattttaattgttagttgtatttttcacatatcaacatcacaaattatttaaaaagcgcaaatatctttataatttttattggcctaaccaactaattaattaagataaattgcgcttatatttaaaataataacactgaaactcaatgtatttacttattaaaattgatgtttaaatacaactttactaacattcatttttcggtttacattaatttgttagataacgatatatatcatctcttacagctttatccagtgctaaatccatcgttactacgtttgaaccattcggcattttatcttgcttttctgaaccttctatatatccagcagttcctaaataataaaaatatataccatcatcatcttttttctgtacaaaaatatacattttaattccttttgctctatgggacaaaattttctgaacttcttttgattctagcgttctattagatttagtaaaccattttaattcatcttgacttaaaaattcatcttcatattttgtgctatcacttatatcctcatgcttatcataagtgataaatattggcatttcttggctttttatcatgtatcccatgattacagacgaaccatttttattccaattaaatattttactaaaatcttctcttgaatatttattatataaaatcagtccatttttacctttttggtatttttcattgttatactttgataattcaataagatcttctaaaaacatattaaatgtttgattacttagagcattagtaaatgcatcgcttagtcttatcattctttcattacgttctataatgggacttccatagattttttcaattcctgcgttgtaaaatgaaaaatctaaaattcttaatgaagtatctatatcatcttctgttatatccttaacttcgttcaacattttattttttaattcatcatatgttaattcattttttaaaagttcttctaaaactaaactatcgattcttttcaatccaggtgctatttgccttgaaaagaaaaccagatttttagattcattttccgtcaataatgtatctatttttttatatctcactaagaactcgtaataattactaaatttagaaaatataacgcttggatctatagaatgttgttgtatgaaatccattagtaacggcatgtgtcccaatctattttcaacttcttcataagcttttaatattaatttattttgatttaatgatactgcatccaatgaattgtaaatctgttttttagcaacttcttcaaaattaattgtagatactccattaatcgaatcgttattcgttaaaaacttcttataattatctttattttgcgattgatccccagaaagcgcaatcggaattaaataatttgtcttataattaccaataaaatcaattactgtaacatactctttatttgaactttttcttaatcctctaccaagttgctgaatgaatataatactagactctgttggtctcaacattacaacttgattgacttctggaatatcaataccttcgttaaaaagatctacagttataatatagttaatcttaccttcttttaatttttctattacaatttggcgataattaacactatcatctcctgttaaagcaacacttttaatcccttttgaacttagtttatccgctaaatcataagcttcttttttgctacttacaaaaatcaatccttgtaaaatttcacctgaatatccatagtaatctgtcttttgaataatataattaactctttcatcagaagttaaatatctcagtttagttacatcatcttctttaataccttgatgtacataatcagtcacaccaaaataatgaaatggacataaaatatcactttctaatgctgcttgtaaccttatttcatatgcaatattataatcaaacagttcaaatatacttaattcatctgatctttctggtgtagcagtcattcccagcatgaacttaggtttgaagtagttaaatactcgttgataagtagatgcagcagaacgatgtgcttcatcaaaaacaatataatcaaattcattttcatcaaattgcttaaaattatcatctctagataatgtttgaatggttgcaaataaatatttggcatcgacatctctatgttttcctgtcaacaatccaaaatcactatcattttttataggtaatacttttttaaattcttccttagctctatttaaaatcccctcattatgaacaataaataaaaatttattagggtttacttctctaacatctaatgcacataaaatcgttttacctgtaccagttgcagatattattaacgccttatctttggctttatccctaatagcttttaatgaccttaatgcttctgcttgcattaaattgggtacaatttccactgattttttcaccttatcagctagcagcatttgagtttgttcaacctccgctaatttttctaaggaacggtactcaaatgattctttatatgaattaatccattgctcagtcagtggggtactcttttgccataacaagtcaaattcactttttacactatcaactaaatcgccatttttcatagtagacagtaaaacattatgctcataattaacctttaacgcattagatgttaaattagagcttcctattaccatagaactataatccttatgctcaaaaatatatcctttggcatggaatccagcaatatcagttaatcttacctctacattttttaatttaagtaattctccatacattttaggactattaaaccctaagtaattagatgttaatattttccctttaacacccttattgcttaaatctaatagttgagcctttaagctggctaaaccgctttctgttataaaagccacagaaaaataaaacgtttcacatttttgaagttcatctataattgttgaaagaactttttcatttttattatttactaaaagcttcggtgtataattccctttatgagaaatatgtttgtctataaaccctttatgtaaagattgattgaaatcatttagtaatctactcatattatccctcagtcataattttattaacggctggtatatccgctggggcccaatttaatttatcaagttcgtttattgacaaccattcaatactcttatgttcagttagagttggtaactctttgtttaaagtacatttgtatgttgttaacctaacaattccaaaatcatattcatgttctgtagttataactttgtctccaacaattaaatcacatttcatttcttctctaatttctctaatcaaagcgtctttttcagtttcattcttttcaaccttaccgccaggaaattcccacattaaaggcagactcattttttcacttctctgtgcacaaagaattttgttatcagaaaaaataatagctcctactacattgattacttttttcataagactcacccttcaatttaaaatcatcttaattgttattctatcaaaaattacaaaactatatataaatcaatattaaaaattaatattttacattcacatgaacgctctactccatgcattttcatacacatctattatataatacttgtgaaaagtattgtcttggggctgtgtttttttacttttggggcgtatttctttataattcattacataaatgtaagggctttagttttcatgttttattaagtctaactgagattttgaaaggatgtttagcaacaatggataaagaattatggatagaacgagctaatgatagtttagttaaacatttttatgagcagcaatctgacattgaacagcgagaaggttttgaaagtaaattaacatttggtactgcgggtatacgcggaaaattcggtcttggtgaaggtcgacttaataagtttactattgaaaaattggcattaggtttagcgcgttatttaaatgcccaaacaaacagtccaacaatagtcattcattatgatattagacatctttcaactgaattcgcccaaataattgctaatgtattagcaaaccatcaaataacagtttatttacctgatacatataaaacgacaccggaattatcgttcgcggtgcgcaatcttaatactactgctggcattatgattacagcaagtcataatccgaaagactataacggcatcaaagtatatggttctgatggtgcgcaattatcgactgatgcatctgagcttgcaagtcgttatatcgaagaagttggcgatccattacagattgatatacctatttctaaacaaaatacatcttatatcaagccttttccgaaatctgtaactgatgactatatgaaacacattcaaaatatgattggctatattcctaaatctgatttacaagttgtgttcactagtttgcatggtacaagtgttccgattgtacctgagttattacaatctttgaatttcaatcaatttaatcttgtagaagcacaatgtaaacctgatccgaatttcagctcagttcaaagtgctaatcctgaagatcatcgcgcttttgatcaagcagtcgaacttgcaaataaaagtcatgcagacttattaatatcaactgaccctgatgcagatcgacttggtattgctgaacgtgatgcacacggtcatatcacatattttaatggcaaccaaattggtgcgctgttacttaattatcgtattcaacaaacgtctcaattacgtcaccgcttaatgattcaatctattgtaagtagtgagttaacaaagtcattagcacgctataataatgttgaatacaaagaggtgctgacgggctttaaatttattgctcaggaaataagacaactggatgatcatcaaaatatgattttcgcatttgaagagagttacggttttctatcagagccttttgtacgtgataaagatgccgtacaaattgtgccactcattataaaatacgcttctgagttaaaattatatggcaaaacattgaaagatgaattagaacagatttatcaaactgttggtagacatgaggatacattattctcgcatacgctagaaggatttgaagggaaaaagaaaattaatgcaataatgaccaaattccgttcaaatccaccgcaagagattcaaggactcaaagtgaaagcaattgaagattatttaactagcgaggtttatcatttggataaagatacaacgtcgcagattaattctcctaaatcaaatgttattcgtgtcttatttgacgaaggatttatcgctttacgtccttctggtactgaacctaaaattaaattatatgtgtcgttaaaatgtccgaattttgatgatgtagctcaaaaaattaatgcgatgatttttagctaattaaaaattttatacatcgaaatattacatttcattttatgcttatcagcccttttgaaactagaatccttatgttttcgcgttttgaaggggctaatttgtaataatttttcaaaagtatattagaaaattaattttcatgtatttttcatattaagcggtaataatataataattaataccgcgacctatttaattgttttcgcgatgaaaaaggtttagaattacaaaaataactattttaaatttagttacaaatatattttagaaaggatgtgaaataatgaaaggctctaaacaaatacttttgattatgggcattatatctcttattgttttatttatttttacactattcatcatggcgcaatatgcaaaacattatgaacaaaaatccgacagttccaacgcacatactttaaattcatcatcagccataattgagcaacatactatgtcgaatttagcgtctctagatttatacgctcctgttcgtaacattacttctagtcgtgatattcatcccatttatttcatgacaaaagattaaaacttcctttttcataaccccattcattcaactaataaattaaaaaatgataaaaacgtactgttttttagaaacatacatatataagaaacgcatccattactaaaagacagtacattatattctatcaggaaggtgcaacaatgaccgtcaacatcgtatttagtatcgtattctgcataagtatggttatattaggcatttatgtcgcaataactaaagatttcacactaatctcttttataaatcaaacggccattgcagataaacacaagaaccaaattgcatatatatttacgctatgtataagtttgagtgcagtatttttaatgtcttcaattctaagctttgaatatgattttattgcattagcattcttatttttaacgatagcattattacttatcgcattattctacgtttgcttttataaaattacaaaatacccataaatgtttgtgatagtgtgttggttagatttattgatgcgctgtcagtaagtaattgtttgcgaaaaaaatacaaccttgtacgaatacaaagttgcattaatatagaatcatttatgctttttaatatcacaaaacaaattgattaaactagctaaaatagtcaaaattggaatcaagattacataaatatcataacctctagatattagtatacataatataattagcgaccctattataattgctaacttataagccaaactaattttatatttcatttcaattcccaccttaatagcatttattaaaattctataatgtttacatagacttcttaacaaactttaacccagctaagctaagtattgaaataattacacctcctaatataaatatattacttaagcttagtaaaggtataattatacttatcagtcctaaagacaatgtatccgctgcataattcgatgtagatgagatactaaatactttccccatcaaatgatttggcgtttttatttgaatggcaactgatcttgttagtccctctatagattgtccaagtcccaataatgttgcacctatatataatatcgccacacttggaaacacattaataatcgataagccaattccccaaactaaaacaccaatactaaatttaaagattaatcgcttttctgacagcaaacccataatcaatgacattaataaagatgctatacctaaacatgatgtagctagtccatatacaccaacgccctcttttaatatattggaaataaacaatggtaatacaacacgccaaaggccagtattaatcaatatgcaggcaaattggatgattataataaatggaatttctttagattgtttcaagaattcccaagtttcagaaaaatcttcttttgagtgtctatcaatcatgttgttatttgtatattttaaaagtgcattaaaaataaatcctaaaaatagcaatatactacaaataaaaaagacgccaacattaccaactagtattacaatgacaccaattaaagcaggtaaaataatatttgagcctctttgcaaactatcgattaacgcattacttgttgctaaatgctcctcatcaataatttcaggaagaattgccctaaacgcaggatccgtatagcagttaataatggtgatagctgtagatatggttagaagcgtcagataatttaaatttgatgttattgcaagtaaaggaataattattataatcaaacttagtataagatcagatagataaagtattttctttttattatgtttatcagaatatgcgccaccgaaaataccaaatataataaatggaagtgtttgactcataaccatcattgataattttaaagatgattggtttgtcaattcaacagtaaaccaaattatttgtaacgaaaacagcacaaaacaactccgacgtaagaaattaccaatcaataaatatgtaaagtttctatttttcaaaacttctaaatacaacatatttatcacctctcataaaaataattgaatgcatccaccagcttttttagaccttcttctaaactctctttatccaaagcgcaattaattctaatataatttagtcagttaaatatcaattatttcgaaatatacatactacttgaaacaccatacataacccccaaaatgactactcagaggttatattctactaattatgattatattaaatatgaaaatattatcaaaaaaatcaaatttataacaaaaatacaccccttaaagttaggtctttcaatccaacttttggggtgtatatcattctcatcatattctaggttgtttttaacaaactaaatatagtgaatgcaaatcaactattatttaaattatgaattattttaattctttcttctacgagccaataacattaatccagcaattccaattatactactaaagatcaaacctttttgcgtgctttctaaacctgtttttggtaattctgctcgttttttctcttgattagctactgattctttagcaattttagattttttaactttatcatttttatccattgaatgaactgggccatttggttttgctctgtctttcgataatcctggattgttaggatttactgggccacttggatgagttggtctgctcggcttctctgggttttcaggtccttttggatcttttggtttctctccaccgaactctacaatcttatctactggttgttttgtgatctcttctgttggttgaccctcgccaactttttcacctgttaatgggttcactgtgattggtgttgtgattgtcttacttcctggttgtccttcttgtttcactcgctcttcaccaggttgtaattttggattaaactcacgttttgtttcaaacggtatctctactgtttttgtttctggtgtacccgtttttggtccgtgtttaatcacatcatccactggctcttcgatcacttttcctgtgtctggattcttgattcctggtttacctggtactttttccgtttgatctgttggtaagtttggatcaaagatatctttatgaccttgcggtattttctcgccaccgaattctgttaattcattaactggatcttttgtgatttcttctttcgattcacctttactaataatttctccagttaatggattttttagtgttggcgtcgttattgtcttctcacctttttgtccttctcttgttactttttctgtccctggtgctaaatcaggattaaatttacgttctttctcgaatggaatttcttctttttctacaatcgagtctccttttacaggtccatattttgttacgctatcgaccggtggtctaactacatctcctgtttctggattcttaattcctggtttacctggaacttcctctttctctcctgttggtaacttcggatcaaattcgtctcgatgacctggtgttatcgtttctggtccgtattctgttaattcattaatcggatcttttgtgatttcttctttcgattcacctttactaataatttctccagttaatggattttttagtgttggcgtcgttattgtcttctcacctttttgtccttctcttgttactttttctgtccctggtgctaaatccggattaaatttacgttctttctcgaatggaatctcttctttttctacaatcgagtctccttttacaggtccatattttgttacgctatcgaccggcggtctaactacatctcctgtttctggattcttaattcctggtttacctggaacttcctctttctctcctgttggtaacttcggatcaaattcgtctcgatgacctggcgctattgtttcaggtccgtattctgttaattcattaatcggatcttttgtaatctcttcttttggttcacctttactaataattactccagttaatggattttttagtgttggtgtcgttattgtcttctcacctttttgtccttctcttgttactttttctgtccctggtgctaaatccggattaaatttacgttctttcttgaatggaatctcttcaacttttttttctaattctgttattgtttttggcgcttctggtgtaaaagtaaactctgaacctttcaagtcagttctcatccagccatttgcatttatcccttgattaaggccccatctttgactagatgtaattaagaaattatatgcctgatttttagataaacctaaatctgttattgaagtctcccaagttttaccagcatattctgctctcattttaccagttgaagcaacataagttaagatgacatcatttaaacgttgcccatgaaactttccatctgatgtattagttgaattgtccgcatagtttaaaaaattagtttttgatttatcaatattttctccaaccatttgtgaattaccagaactgtcatttttcacaaaagctccgtatcctctataaccttgtccagcttgcttttcagttttgtccatggaacttgtataaatgtatccagtatcaattttaaatccgcctgaatttaccagacctttatccccaaggattccaccattagttaaatattcttctgcatttcctttactaaataagaacccccaaccatcagcacctgtggtatttgattgatggttatttgccactctaactttaaaattgaaatccttactaaaatctattttattttttaattgtaaagctcctatcaaaccattactttcattaccaacattaaacctggttacctctgatacccctaaatctgttggtttttttgtatatcaacacttccgtaaccttcaaaatgttctttaccttgaattgtaattggggtagattcaactacatttttagaatctcttgtaatatcaaaagagccttcatcaacagaacgagcttttctaaccttaggtgtctctgcgttatgagtgactgacgatttcggctaaacttcagcaacatcagctacttcttttggtgtatcctccttttttgatatatcttcagcttttactgatggttcatgttcgattgtgtctttgtttgaagttacttcagatttagcttctacaccctgtggtgcagtgtctttgtttgttacttcttcaatcttcacttcttttgattggacattatcttttaatgtagttggattctcaatattgttttcagctgcttctgcctcttgttgagttcccaaatacattagtgagccaattaaaatagatgctgttccaactgtaaattttcttattgaatatttattcaatttatttgatagaaaatctactcttttatttaccggtcctttcttatctctcatttgcatactcctttttccatattttccactttacttacagtgaatttacatgtaattttacaaatacaataggagttgcacaatggaatataacacttatctttataaaattattttatatattgacgcacttaaaacaatctacaaataaaattattatttttagttttcaatgaataattcattcttatctcttggaaaaacccatcaactcaatagcattgaatttctaaaataaaaaataccttaacgcatttaaaaaatacatttaactgcaccaagatattaaaatctcgaaacatactttatgtttcattaatatttatttcactcaaaagatttttaatataattgtgttgttttacagaaacaacaatgattacatttctactatcatgtgggtctctacatttattcaagtaacccttttttgataaatcttttacgcttttaacaattctagattggtctataccgatataacttataatgtctctcataaaatatttaccttcatcatttttaaatacatctaaatatgctaatactaaataattatctaatgtaagacaaaaatatttttttaaatatttacgcagctcatatgtagttaatactcttttcattaatttaatattgctcttgcttttcaaatcattcatcaagtcttcatcccttacttttaattgtcacgtcaaataatatttgtctttaactagtaataactccaaatatatttagtttgtggtgctagctataaacacaaatgaatcataacactatattttgattttgttcaattgtttttatttttggataataaatgaatttgtcatttgttattctgtgatttttagttatttatattttatatatattatatataaaaatatttaggttaacatgtcttcaaaagagattgcttttatattactttaaataatataaagtattgggacatcagaaaatagtaggagaatgtaaggtggactatcaaactttcgaaaaggtcaataaattcataaatgtagaagcgtacatattttttctcactcaagagttaaagcaacaatataaattatcattaaaagaattgttgatattagcatatttttattacaaaaatgaacacagtatttcactaaaagaaatcattggtgacatactttacaaacaatctgatgttgtaaagaacattaagtcactatctaaaaaaggatttataaataagtctagaaacgaagcagatgaacgccgtatttttgtttcagttactccaatacaacgtaaaaagattgcttgtgttattaatgagttagataaaataattaaaggatttaataaggaaagagactacataaaatatcaatgggctccaaaatatagcaaagaattttttatactttttatgaacattatgtactcaaaagattttttaaaatatcgatttaatttaacatttcttgatttatctatcttatatgtaatatcatctcgaaaaaatgagatactaaatttaaaagatttgtttgaaagtattagatttatgtatcctcaaattgttaggtcagttaatagattaaataataaaggtatgctaatcaaagaacgatcccttgcagatgaaaggattgtgttaatcaaaataaataaaatacaatataacactattaaaagcatattcacagatacttccaagattctcaaaccaagaaaatttttcttttaaatttaaacagatttacctcttgataaaataaataagcaatcatactacttctcaatttagtataaataaaaatacataattaactttcttttgtttttatattatttcaataccctactatatatcacaacacataaattaagcatgacactcattcaatttagttcaccatttcgtgttccaattttactgagtatcatgcttttaatgttataaacctaatgctttaataaatcgtgttaattcttctcgcatactgtcatctttcaatgcatattctatggtagttttaacgaagcctaatttttctccaacgtcataacgttcgccttcgaagtcatatgcatacacttggttatcattattcatacgttcaatcgcatctgttaactgaatttcgttacctgcgccttctttttgcgtttttaaataatcgaaaatttcaggcgttaatacataacgtcccataatagctaggtttgatggtgccgtaccttgtgctggcttttcaacaaactttttcacttcatactgacgtccgtttttagttaatgggtcaataattccataacgatgagtatctgcttccggaacttcttggacacctataactgagtgccctgtttcttcataaacgtcaatcaactgtttcactgctggcacttcagattcaacaatatcgtcacctaataataccgcaaatggttcattgccgataaattgacgcgcagaactaatcgcatgccctaaacctttttgttctttctgccttacataaaaaatattcgcaagttccgttgaatactgaactttctctagtaattcagatttacctttttcttttaacaccatttctaattctttttgactatcaaaatgatcttcaatcgcgcgtttgtggcgacctgtcactataataatatcttcaattccagctcttgcagcttcttcaacgatatattgtattgtgggtttatctaagataggaagcatttcctttggcatcgctttagttgctggtaaaaatctagtccctaaaccagcagcgggaatgattgccttttttatttttttcaaagttaatgtgctccttttcctaagtattaaatctatgtatcaacgtcattttaacactaattagaacgccttcatagtgtcattgagtatgtaattatttcttgggaaatttgttttaattttaaaaaacaggcttacttcatataatttatgaaataaacctgtcaattttggattgattatgctttgtgattctttttatttctgcgtaataacgctaaacctaaaatgctaaataatccgccgaacaacatgccgttgtttgttgattcttctccacctgtttcaggtagttcagatttcttagattgtgcttttttagttggtaccactgctttaaccttttcattgatttcaataacaggtgttactactttaccttgttccactggtttagaaggttttttaggttcttctttagcaggtggtattggtttaccaggttcagttggtacctctggcgttggcggtgttggtgtttccggctcgcttggtacttctggtgtcggtggtgttggtgtttccggctcgcttggtacttctggtgtcggtggcgttggtggcacgattggaggtgttgtatcttcttcaatcgtttgttgaccttcattatgaccacttacttgtggaagtgtatcttcttcaaagtcaacactattgtgtccaccgaattgataatttggtttatctttatttgtatcttcttcaataatttcagtgtgcttattgaatccgtgaatatgtggcacactgtcgaagtcgatatcaatgatattaccaccttgttcatacttaggtttgtctttctctgtatcttcttcgaatgattggttaccattattttgaccatgaatttgaggtacactatcgaaatcgatatctacgatattgccaccttgttcatatttcggtttatcttcttctgtgtcttcctcaaatgactgattaccgctattttggccaccttcgtaacctaattcactcttaatatccacgtggctattttcttcgatttcttcaatcacgccataattaccgtgaccattttcagttcctaaaccagaatgagaaatatgatgattgttttcagtaatttcctcgattggtccttgcgcttgaccatgttcttcaggtagttcatctactagttcaatcagattactttcagtcgtatattctttcgtatcttcaattgttgtatgatcgctaacagcaccagttacaataccttttgtagaatcttcgtcaaattcaactaggttagactcagtagtaacctgaccaccacctgggtttgtatcttcttcatattcaacaacatcagcatgatgttttgaattttcatgtgtcgattcttcaaagtctacatgaatagaatcttcttcagtttcaatggtaccttctgcatgaccttctgcaccttcaacagctgtatgatattcaaaatcaattggcttagaatcattactttcttcgattgtaccagtcaattcatgcttctccactggcggctctgatttaaattcaagttcgataggagtactatgttctataataggttcctttagtttatctttgccgtcgccttgagcgttattagagtaaaatgcaacgccatttttccaagttaaattacttgtataataatagttataatatccaaaaaggtgtgtttgaaattctaagttgctagcatttgaatcataatacccttcatattttattacataatttttactttggtctaaattattaaagtttaaagaataaccaccattagtatcaaaatctaaactcatattatcagtcacatcttcaaatttgctgacatcatcaagctttgcatatacgctttcagctaaatcgtctgaaccaatgtgtttatataccttaactgttggattattaacccctggtttatttcctttagttacttgaccagttactgtcacagagcttaacgactggttgttaggtttcatgtacgcaaaatgactaaatttcccatctactttatttaaagtatcaattcgaccattagctgttactccccaattatctctaactccacctaaatattgaatattaaatattttgctaaccgtagtctcacccaatttaacttcaacattttggttacctttttgcgtcactgttgtaggatcaataaatagatttaaagataattcagcagttaaatctttcttttcttgtacatattctttaaacgtatatctaacttttctttctccaattatttctcctgtcgccataacttgaccatctgtactttttatctccggaactttacgcagtgttgagataccatgagtttcaacattatcgcttaatgtgaaatcaaaataatctcccgccttaattccttctccaaatttccatttatatttcaaggttactctttctgcgttatgaggatttacaacattcgtatcttgtttatgtcctacaatttcactaccttcttctacttccactttatttgttacatctgtacctgtcgctttagtttcttccactacttctttctctgcaactgctgtaacgtcagttgatcttttcattcttggtttaatttctgagacgttacttggttgagctatgtcaacttgagttcctgtagtttccttatcagcaactttttccgatggcaaatcaactcgcgaagtttctacttttggtgcttgcacagttttcggtgcttcttctgttgttacttgtgttgattgtgatggttgctcagttgatgtcgcgctgtatgattgtgtttcatctattgtattaacgttatttgtagttgtttgtgtttcgcttgctttactttcagtagctgaactcccactttcctctactgtagtattgttttgttccgatgctgcagcttctttttcttgtcccattccaacaacgatcattgttcctaagaatactgaggccgctcccaatttgtgttttcttatgccgtatctaagattgcttttcactataatattctcccttaaatgcaaaattcatttatttttaaaactcaataaatgcaattctatattgttcggtttttaaaagcaatgaaaaaaagcgagttaataaaaagttaagattgttgttaactttatgtataatgagttttttattatttgaaactcacatatatattgcatacaaagctcttgaacaccttgatataacaggcttgtattttttatacttactttttaaattaaattcaaattcatctaatttaaaacaatatactaaaccatacataataatcgcctgtacaatgcatcattaacaagtcactgaaacgcctttcattgtattaataacgtcactataatttttatatcgttcggtttttgtttgattttaatgattatttatacaaaaacagccgtatttcaagccgacattttaaatttaactaaatttgcatctagttaataattgcatttatcaaatttgtcttattgatccaatctaatttgtactcacaaactagtttaaaattctaactttatctctcagttcgttatcaatcatcagacataaaccaatgaagcaatcagaaaacactctaattttctattagaaatttgatttaatataaaaaaacaggcttacttcatataatttatgaaataaacccgtcaatttttgtttaattatgctttgtgattctttttatttctgcgtaataatgctaaacctagaatgctgaataatccgccgaacaacatacctttgtttgttgattcttctccacctgtttcaggtagttcagatttcttagattgtggttttttagttggtgccactgctttaaccttttcattgatttcaataacaggtgttactactttaccttgttccactggtttagaaggctttttaggttcttctttggcaggtggtactggtttaccaggttcagctggtacctctggtgttggcggtgttggagtttctggctcactcggcacttctggtgtcggtggtgttggtgtttccggctcacttggtacttctggtgttggtggcgttggtgtttccggctcacttggtacttctggtgtcggtggcgttggtggcacgattggaggtgttgtatcttcttcaatcgtttgttgaccttcattttggccgcttacttttggaagtgtatcttcttcaaagtcaacactattgtgtccaccgaattgataacttggtttatctttatttgtatcttcttcaataatttcagtgtgcttattgaatccgtgaatatgtggcacactgtcgaagtcgatatcaatgatgttaccgccatgttcatacttaggtttgtctttttctgtatcttcctcgaatgactgattacctttattttgaccatgaatttgaggtacactatcaaaatcgatatctacgatattgccaccttgttcatatttaggtttgtcttcttctgtgtcttcctcgaatgactggttaccgctattttggccaccttcataacctaattcactcttaatatcaacgtggctattttcttcgatttcttcaatcacgtcataattcccgtgaccattttcagttcctaaaccagaatgagaaatatgatgattgttttcagtaatttcctcgactggtccttgtgcttgaccatgctcttcaggtaattcatccactaattcaatcagattactttcagttgtatattctttcgtatcttcaactgttgtatgatcgctcactgcgccagttacaataccttttgtagactcttcgtcaaattcaactaagttagactcagtagtaacctgaccaccacctgggtttgtatcttcttcatattcaacaacatcagcgtgatgttttgaattttcatgtgtagattcttcaaagtcaattggatttgattcctcagaggactcagtgtatcctccaacgtgacctgcttcgctatccacagcagtatggtaatcgatatcaatagctgatgaatccgtttcttctattgtttcaatgtatccatcaacatatccacctccaccatctatagctgtgtggtaatcaatgtcaagagttgatgaatcatattcctcttcaacagtagttactaaattcttatcatattgacctgtaagagtttctttaattgtatcttctttatattcaaatttattattttgaataatcggaccatttttcccatttccgttcgctttattactgtataaaactaaaccattatcccaagttaaggtatatcctctatcataataatacttataaagttgctctggatgtcctaccatttgtgttctaaaatcaacttcatcagtaccatttaaatactctccatcatagtgaacaacataagttttatctagattttctatattcaatgaatagcttccattattttgtaaattcaaattcccactcatattacttgtgacttctttaaatttagaagtatctgtcgtatttgcatatacactcttcgctatgtcttcattattacccaagtattcaaatatcctaacttttggttgatttccattctgattactacctttcattaaagttccagtaacagtcacacttgtcgttttaccattattaggtttaataaatgcaacatgcgaaaatctattattcgctttattaaatgtctcaatcgatccatttaaattggcataataattcccaataccatctttatatttaacatctaattcctttgaagtttgttcttcatttagtgttgaagttatagtttgatttccattagtttgtacagttttaggatcaataaataaattaatttctagttcagccgttacatcaaccttatcttcaatatcatttgtaaatgtatatctaatctttccaccttctaaaacttcacctgtcgccattacgactgaaccatttttaatttctggtacttttctagcagttgatacgccatgcgtatttacattatttgataaagtaaagtcaaagtagtcaccttgatgtaaaccattctcaaatttcaacttatattttagtaccgctcgttgtcctgcatgaggttctactttatttgtattgttatgcccctcaatagaaccaatttctactgtaactttacttgttacatctgtacccgtttccactttcgcgttactagcttccttagcttccgctacatctgctgatcttgtcacacgtggcttactttctgatgccgttcttggctgtgccacttcaacttgtgtttctgcgacttgattttgtgtagcctttttaggtgttaaatctacttgtctttgatctccgctattgtcttgagattgtgttgtttccttaacttgaggtttcgcttcttccttaactacctcttctttaactgtttctatatttgctggttgtgcagtttgtggtgcttgtactgcttttggtgcttcttcagttgttacttgtgttgcgtttgacggttgttctgttactgttgcgttatatgattgagtttcttctatatgattaacgttagttgcagttgtttgtgtttcacttgttttattatcagtagctgaattcccattttcttctactgtagttgtcttttgttctgatgctgcagcttctttgtcttgtcccatcccaacaacgatcattgttcctaagaatactgatgctgctcccaatttatgttttctaatgccgtacctaagattgtttttcactataatatctccctttaaatgcaaaattcattaattttttaaacttaataaatgcaagtctatattgttcggtttttaaaagcaatacaaaaaagcgagttaatgaaaagttaagattgtcattaattttatgttaattgataattttattatttgaaatatacctataaattgtattcaagtcatcagaaacccttgtcacacaaggcttgtattttttatacttatttttttaaattaaattcatcattatctaatttaaaacaatatactaaacgtttcataattatcgcctgtacaatacgcacaaaaacatgtcttgaaacgcctttcatcactctaaaatacccaatatactttttatatcgttcggattctgagtatttcagacgattttctgcataaaaataaacgtgtttcaaggcaatatattgcaattacctaaaaacacgtttacttaatatttagttaaacaaataagctaatgaataaaatgaagatgatacctgaaacggaaataatcgtttctaataatgaccatgttaagaatgtttcttttacagttaaaccaaaatattctttaaacatccaaaatcctgcgtcatttacatgagacaaaatcacactacctgcacctatcgcaagtacaactaatgcaacatttacatctgatgattgtaataatggtaagacaatacctgtagttgaaatcgcagctactgtagccgaacctaatgcgatacgtagcacagctgcaacaatccatgctagtaaaatcggagacatctctgtaccttcaaacattttagcaattgtatttccgacaccgccgtcaattaatacttgtttaaatgtaccgccaccgccaataatcaataacatcattccgattggataaatcgcattcgtcactgattccataatatgattcatcttacgctttctcattaatcccatcgtaacgattgcaaataatactgctattagcatggctgtccctgctgttcctatcatataaatgatagattcaaatagatttgtaggtttgtcatgcccagttacaagttgcgttatcgtagacactaacattaatatgactggtaatgttgctgttaataaactcataccaaatcctggcatctcttgatccgtaaattctttttgtgcacctaacgctgaaatatcgccttctcgtgtatacgcagacggaatcattttttgtgcaactttgttaaatataggccctgcaatgagtgtaactggaatggcaataatcataccatacagtaatacatctccaacatttgcctttaattcttttgcgatgactaccggtcctggatgtggtggtaaaaagccatgtgtcactgataaagctgttaccataggtagtcctagttttaacactgaaacatttgcgcgttttgctactgtaaatactaatggaatcagtaagactaaacctacttcaaagaacaatgcaataccgacgataaatgctgcaacaagcattgcccattgtacatgtttttgaccaaatttttgaatcaacgtgtctgcgattcgagttgcaccaccaccatcagcaagcaatttcccaagtatggcacctaaaccgaatatcagtgcaatgtggccgagcgtactgcccattcctttctcaatcgtctccataattttagtcaatggtatacctagcattaacgctgtaatcatcgatgtgataattaatgaaataaatgtatttaatttaaacccaataattaatactaataaaataacgatacctaaaacaacactgattaacggccatatttcgttaaacatgacattcccctctttctcttttcaatagaatgtaacaccgtcgtcgcgcacgtattccacataatatatagtagtcatggcacaacaactttatctaagatgcttgagtgacgtatttattgtgttttattttcagcgatatgttggcgttgaaaatctgcaatttgttcataattctctgttaaagaacgacttaaattgataaaaatggatacgatctcttggtaaacagtgacattttcttcaatcggcgtatgattgtttgtggcaccgaccatcgatgaaacgattgaaaaatcttcaatgtcacctacagctttaagtccgagcacgcaggcacctaagcatgaactttcataactttcaggaaccactaactctgtgtcaaatatatctgacatcatttgacgccatacttcacttttcgcaaaaccacctgttgcttttatcatcttaggtgtttcattcattacttcaataagcgcaagatagacggtatacaaattgtaaagaacaccttctaatgcagcgcgaatcatatgttcttttttatgagataaagttaaaccgaagaatgaacctcttgcatttgcgttccaaagcggcgcacgttctcctgctaaatagggatggaatattaaaccatctgcacctggtttaacacgctttgcaatttgagttaagacatcataaggatcaacaccgagacgtttcgcagtttcgacttcactcgctagcaactcgtcgcgcaaccatctcaatacgacaccaccattatttacaggacctccgatgacgtagtggtcctctgttaagacataacaaaatattctacctttgtaatcagtacgcggtttatctatcacagtacgaatcgccccagatgtaccgattgtgacagcaacttctcctttaccaacactattgacacctaaattagaaaggaccccatcactcgcaccaataacaaacggtgtatctttattaagccccattaatgttgcataacgttctttcatacctttcatcacatacgttgttggaactaattccggcaacatttccttggaaatacccagcagttctaatgcctcaacatcccaatctaatgtttctaaattaaacatccctgttgcggaagccattgaataatcaatgatatatgtatcaaataaatgatagaaaatgtatgttttaatatctgcaaacttagcagtacgttgaaatacatcttgccattcatgtttcatccaaaaaatcttcgctaatggcgacataggatgaatcggtgtgcctgttcgctggtaaatcgcattgccatcatgcacttcatttattactgttgcatattttgcagcgcggttatctgcccaagtaatattatttgttaatctttgatgttgctgatccatcgcaatcaagctatgcatttgcgcactaaatgacacaaacttaatgtcgtctttattaactttggattctctcataacatatttaatagtcattagtactgcatcaaataattcatctgggttttcttctgagacatcaacgtttggtgtgtgtaaatcatagcctatttgatgtttcatgataaaagttccattttcatcatataagactgacttggtactcgtcgttccaatgtcgacaccaatcatatatttcatgataaatccttctttctttcattttaattcaaccaaaatccttcaatatctttaccaacatcgtcgaaatttaaatgaaacgcttctttcaaaatttgactgtcgtattgttccactgcatcaataaacacttgatgattatgatgtatgcgttcaaaatcttgcgggttctgttgcatacgttgtcgcatggatgttaaaacgagtgccatcattactggttttaaatgactccaaaatgagtttaaatattgatgattagatgctttgattaatgtttcatgaaattcaaagtcatgcttcgtaaatgattctgcatcctcaaattttactgccactttcatcatttcaagttgtttcttcatttcttttacgatgggtagtcgctcttgatttttaactcttgaaaatgcaaatgactctaacatcagtcgcaaatcatacatttctttcttttcttgttccccaaacggcaacacatgtgcacccattctttctaattggatgagttgattttgttgcaataatttaaatgcatctcgaattggcgaacgactcacattaaattgctttgccatttgattttcagtgagtaacgtaccttcagctatgtgaccattcacaatgcctaagcgtaattctgccgcgataccttctccagttgtcataccttccaaccatttctctggatatccatacatcatcaaagtcactccttcattacacgacatacttgtatacaagtatgttaatatagttattatgagtttgcaagcgctttctttacgagcactaaaatagtgaccaccccttttcgatttaaatttaaaggaaatggtcactatcacacgaatgatttaattgttatgttgtatgtgggatatttctaattgttctgtactcatatgcgctttaggtacttcaatgcaataatgcgtttcatgacagtttggacattcgaatcgacgtgttgtcgctgtatgtttcgctttgataactgcccacaaagatggtgagaatatatgctggcagttaggacataaataggcaaccttttgttggtaataaaaagtaacaccaatgccataaccaatcataaatggtaaagcaattaaaaacggccatttatttttcatcaaaattgcacttataatgctagaatattgaattattcctataataccagcactaatccaaatgttacgacgaatacttttcatttcagctgatttactcatgacatgctctatgtcttttaagtgtgtgattggagacgtcgacgcttcatttacgtaatattgaacatttttaattttgtttaataccgcttgttgctgtttaacttgttggttaatttcttgttgtttcatagttagtaaagtattgagcgtcttcaaagtaccttcaccttttagcaacatatctatatcgcttaacgcacaacctaaatctttaagcaataagattaactctaatgtttgtcgctgttgttctgtatacacacgacgctttccttctgtaaatccttgtggtttcaaaatacctttgcgatcataatattgaatcgttcgtgttgtcacattgcataattttgcgagttctccagtcgaatagttagacatagattccacctcctataattaccatagttgatgacccgacgtcacgagcaagtacaatttccacattttaaagaaatttattatactaggcgtcttatttttatgatttcgtaccatgttgatttacaaactcactcaaactaagtaacacacctactaaacatctactctgttatttcagaatgaatttgttgtaatttatcttcaacttcagtaatctctgtcgcacattctttcagtaaatctcgatacttttccgtctctgcattgtttttataacgtattttatgttctaaacttgcccacatatccatacctatcgttctaatttgaatttcaacaggcaatacctcaacgcgttctgctaaaaagactggaatagatacaacgatatgtaaactgcggtaaccattttctttagggtgctgaatataatctttacgttttatcaattgtacgtcttcttgtttaagcaacatctcttcaatcaaataaatatcatctaagtaattacatactacgcgaattccggcaatatccagtatatgttctttggcagtttctgcgctaatctgtaatcctttacgattaagcttttctattaaactacgcatttctttcacacgtcgctccatatgatgtataggattgtgtttataaatgtgattgaaattgtcatctaaaatactcagtttagtgcttatttcctttagtgctgacgaataaatatgatctaactctacgaaacctaataacgtatcaaatgcttcatcaccattttcaaatttacttaaactatttttaaaatcatgtcgcaaatcctctaaatatagtgatggttttcgatctacatacatttttatactaacctccgatatataatcatctttattgtacctaacattttattaagataatactaatacactatcgaactttgggctgatactgaaacagcacaaagaaactcaaacaattcgaattatgtatcaaaaccttcaattacaggaagtgattttaaaatgatttaacgcaaaaaaacacctgttaccgttatataggtacaagtgcttaattgatagagatgttatacgtctttaaatgattccacaacttttggatgtggaccatccataagcggttctctttgtcgaacgccaccactttggttgccaattgattcgctatcaaagtacgatttatcttgatttgattgttcttgaatatgttcttcattatcagttgttgcatattcactatccacctctgttttttccattgttgctgtatggaattgtacgaagttctcttcttctaatgctttgatttcttctttcgataacgctcgataccaatctttcgcttttttcgccgcaataggaacaacatctttttcaagatatccttcttttaacattgcattcgcaatttctatcgctttttgccgtttaattacttcaaattctttccatttttcggggtaacctttcattgtaaagggcatttccttaacctccaatatgttataattcatgttatataccaccataattataaaatgaaacatattaaacacatttttttagactcccgtcataataacttcagacaaacgttagtctgacctgataaatatttaattttaaacgttcttgtctctctcacgaaaaccattgtgttgaatattcatcattgctgattgaatataattatactgtggtaaatctggtaatatctttatttctaattctgtatttaattcgaaatgcttagcgatgttttcaaatattgctaaatactcgcccattaattgttcatttattgtaagtctatcttcattagccatggctctatttaacataaagctaatttcttctaatgcgaataagctaggataataattttgaatcaatgtcttatcactaaataattcaccattagctgcattataaacttgcgtcatgttatttaatttcacagataggttcatagccgtgtttttctgatacacatcatctttatattgattttcagaaaataaataatgaaagagcgttgcttctttacgaacaacttcagccattacattaggaagcaatgcggatgcggtacgttgtccaaggacaaataaacctatgattgcaatcacaatacccattgcaacgtcaataactcttggaaacgcaatgttaattgttaaattctgtgatgctaatccgttcattaaaataacttgtattgtaataaaaactactgcaatcgcataatttgctcccaccaatgcttcagtaaacaatgctgcaatgcccattaaaattactgcaacaggtgttggtattgaaaacaacaatatgactgaaagtactaacacacctaaaatagtacctaaacctcgtgccatacctctctcgattgcatgtatagttgatgttcctagtaatattgtatgtgcagataacggtatccagtatgctttttcaaaatcaaacattaacgcaataaatatcgctatcatcataatcgctgtatatctcaatgtatttctaaaaacaatagagtctaatgttaaattttgataaatgcgtttactatataaaggttttcgcatgtctgcttcatacgcaatacgcgcttcatttgcatgcaccatttcatcaattttcaatatatggttgaataaattttgaaattcctctgttactgtcacttcttttcgccaatatcttacattttcctcactattatctagttgtgcaatgatatgatccatcatttcaattaactcatctggcaatggtcgaatttgtttagcgttcaactctaacagttcagaataaatcccttgggcagatgtgtgtaataataataatttttggaaacgtctacttaatttatcgttacttgaagtagaagtgattaataatttatcagatgctttaaaactatccaccgctgtttttgctacttgtaaaaaagcagatttatcattataagtgtgtaacaacttagatatgagtttaaaatcattttgaattgcttgttcttcagctttgtttttagaaaatacgatcgtgattaacaccatcatagtggcaagtataccgcctactaaaatcgcaaagcctctatataatgcttcttcgggagctataggtaagttaatgggtagactgaatgtcacaatgaagaatgtcgatgacggtccagctatttttaaggcagtaaatatataaaatggtataaccgtaacaattaataatgtcattccaaaaacgagtggcgttttggctgttagcgtaccaagcatcatacatattgcaaacgctaaattacaaattattacagttcgcagcttagatcgcgacggacctttaaaaacataaatatgggctagtgttccggttgcaactaataatccaaattggaaattaccacataagtaaccgattattgcaggaataatcattaacagtccctgtcttacacctttataaaagtctaagttaagtcgattgatttttatgagtgatgtcaaaaagatgtcatttcgacttctcctttccttgtcaaaatatttccataatctttttattagcatagttaaaatgaatttgttgctataaattttaaatacgcaacatatgtcattataacaccttatgctcaattatctaaatttaaaaacttttaaagtccaattaaaattaatttctaatgttatttaacatcgttgaacctttggtcgcccacctttgcgctagttaaaatttatatgtacttttacaagcgttacctgactaatgttttaaaaccttatttctttacatatatcatttcaataacttcattttcatcttaaaccatatctgttttaaaaagtttcaatttcaacgcaaaaaaagcaataagccccaactatgtgaaagcttactgcttgtttaaattatttttctattgctttatcatcactaacaattaaaggttgatctggtttcacatagaaccacataatcacagcgattactgctggaacgattaacaattggaatgtcattgtccaacccaaatgttctacgaatagacctgctaatagcggactgattaatgcacctatattaccccataagttcatccaccctgatactgtaccagagaagttacgtcctaagtcagttgctgcagcccaactcatacccattgaaataccgataccaccaagacctagtgataaccagaaaatacttacatataaatttcctgtgcgtacagcaaagataattgaaactgcaaacacaataaatcctgcaattgcaattacacctctagctacgaattttgaacgacctaatcctaatacacggtcagaaattgcacctgctgataagattaagaagaacattaataaccaaggtaatgaactaatgctcatttctttaaagttaacgtggaatacttctgttaaatacgtcggtaaccaaattaagaataatgtaatgataaattgtacaacaaagtattgaattgcaattgcatagaagctaaaacgtttaaagaaatcattccatggtggtgatgacttttcagtagctacgatatcacgattttccataatgaaacgtttctccgcttcattaaccattctatgttgctcaggtaagtctttggcaataatcgcccataatacagccattaaaatacctactgcaccaaaaatgtaaaatactgcttgccagttaaatgcgttaacaatagcaattgtaactattggtgctaatacaggtccgaaatatgatcctgctaataatgcacttgatgctctacctttttcatttttagagaaccaaaatgaattaaacacagcattagaagggtacattggcgcctcacctacaccaaataagaatctcactaaataaattaaaccgtggttcttaatcatacccgttaagattgtaaatgcactccaccaaactaatgcaattgtaatcatcttacgtggaccgaatttttcagccaacatccccgatggtacttgcattaatgcataacctagagagaagaatgatgccaataaaccaaattgtggttttgtcatccctaaatcatccatcatttgcttagcgatatatgaaatgtttgctctatccatatacgcaataaccccaataaagaagaacgcaagcgcgaacatccaccttacgttagttcgtttttccttcataactattcctacttccctaattaattttttaaaacttaccctgaaacgttaaaattttcggacatctggcatgtccacccctactttgtcacaaaattgtaccaaagttattttttataatattatcagacatggaaagcgtttacaatagaatctataaaaattttattaaatttcgcttaacttttgctattaaaacgatataaaggaacttttagttacatagtagcctatcgtttgttaattaaaaatactgcaatcctagtgttttaaaacgtatattgcaggctttcttacatattcgacattcattttaaattgcatataactacattaaccattcattgtgcagcgcctgttgtttagatgatcatttattgactttttgctcttatagcaagcaattttttgatttattgcttataatacattttaagacaaatgtttgtttcaacatcgcatgcgacatcattaattattcatttgaatttatccagtttctatttgtctgcaattgctgaaaattaaaggagcttatttttaataatggaacaaattatcactgaatttattagccgttttgggtatgcagccatttttatattaattttattagaaaatgtactacctatcgtaccatcggaaattattctgacatttgctggtcttatgtctgttaaatcacatttatcaattttaactttatttattattgcaactatcgcatcgtttatagggctgttaattttatattatatctgccgtttgatttcagaagaacgtctatatcgttttattgatcgacacggtaagtggattaaattgaaaagtaaggatttaaagcgagcaaatgattggtttaaaaagtatggcgtatgggctgtatttatctgtcgtttcatacctgtattacgtgtattgattaccattccagctggtgtaaaccgcatgaatgttgtgacatttaccgttatttcattaataggtactacaatctggaatttcggtttaattttactaggacgcactttgagcgatagctttggtatgttgatgactggtcttcatacatattcacgtattatgtatgttgtcatcattatcgcagtcatttactttgctatacgttacattggcaaacgtaagagagtaaaataatattgttgttagcataaaggcatgaattttaaatttctataaacaaaaagcagtgaatcattccatctattgaaatgattcactgcttttttaagtttatttggcatactttagctgaaagtcaactatctttatataaagaaatattactattaacatgatagttatagttgtgaagtaaaaggctaccaacggctgagaaatgataccaattaataatgcaccgacagtcattccaatatatctcacaaaattaaatacacctagcactttcccttttatatgttcaaaccttttagaaattatagtagacagcaaagctggcacaataccaacacaagtacctaatataaatataattactgataatataattacatttgattcgtttaaccatccaaacaataacgtaaatatagcaaatccagttatagtaacacgaagtatcattatttcattatatttttttgaaaatcgcttataaaataaacttcctaatataacactaacagtaataggtaaaaacaaaactcctgatattccaacgcctatatcataggtattatttaataatgttggtaaataaactaatattgaaaagtacgtaaaaaatattaaaaatcccaatgtcactaaagtaataaacactttatcggtcaaatatttttcttcaattttttcagttaattttacaatccctttttcaacatttggaatatcaataaaaaagataatcaaaaataatacgatagatataacgagcaaaaaactaaaaataccaatataatcccatcttgcacctaaagtactccctaagattggtgccaaagctggtgcacatgataaaaatatttgatagttcgccatagcttgagctctaccattatctgtacttagtttggctaataaagttaaagtcacgagaggaataattccgcaaccaattgcttgaaataaccttgatatagcaaataatataaagttatgtgtcactgcacaaataaagctagatatgattactattcccaatcccgttaaaagtacttttttcgaatcacgagaatctatacttctaccaagtacaatttgcataactgcaacgataaatataaaaccgccaactgtcgcatttatccaaaatagtggtacttgaaaatcgtcatatagtctcggaataataggcgtgtatatgttttgaatcaatgatgcgaaaaatgctaaaaatcctagaatatataatctgatattactattaatcatttaaaccatcttctttttttaattcttctatactacggtttaaaaactctataataactgccatttcatcatcatcaaagactttaagtacctcttcatatttttttaccgatttttcatgtaattcatcatgtatataagataattttttcctttttgtgttaatgaataattaacttctcttttgttaaattcattgtgcgattcaactactaagtctttcgctaaaagtttttttatcgatttagtaattgctggttttgatacatttaacatttcagacaaaaatttattattcactttatcattattatcaatcaactctatgatatgaaattgtgttagagataaatctagttcctcattttcctttttatactgtcttcttttatcggcattttctctttctataataaattgttgtaattttaaaataacttctctcttcatatccactattattcctcctcttcattagttaaccggttaactatattattgttgtcactcccatttttgtcaaatattgttgtaattaacatatatttacttagttatgcaccatttattccgcatttcacaaatccacctataatacaaactatcattttaaataagcagaatttaccctgtcttccacacaaattgttttcgacactttaatgtgcctactatccaaaaaagttactcataacaaattgcgcattttaataaatgtagcaatgccatttgcatgctgcaaaaatactcgtattcatatttatgttttatattattaaagttttttaaatccatatttttataacacttgctatgggataaaattaattttatatataaaatcttaagattcagattatttaatagcaaaggagatagtgatatggatgttttaacaatagaacatttaacaaagaagataggcaacaaaacgattctcgaagatgtatcatttaagctgaaacgcggacaaatagttggtctcgttggagcgaatggtgcaggtaaaacaactttaatgaaagttatattaggttactctagtttccaaagcgggaattttaatgttattaacagcaaggacagcaaaagcaatatcggcgcattgattgaaaatccaggaatatatccttttatgtctggatatgaaaacttgaagttattgaatgaatcaaaaaacactcaagatatcgataaaattgtctcacaacttcatatggatgaatacattcataaaaaagctaaaacgtattctcttggtatgaaacaaaaattaggaattgctatagcatttttaaataaacctcaattcattatcttagatgaaccaatgaatggcttagatccaaaagctgtgcgagatgtacgtgaattgattgtccaaaaagcgcaagaaggtgttactttcttaatttcgagtcatattttaagtgaattagttaaaatcacaaactctatccttattattaacaaaggtaaaattgttacagaaacatcggaagaagaacttaaacaatttaaagataatgatttagaaaatgtattactagaaatcatagaaagggaggaccaagcataaaatgggaactttaattaaacaagaatgtttcaaattatttaaaaagaaatcaacttttatcgcacctattgtctttattctactaatggttgctcaaggttatattgctacaaaatacaatgaaatttttacgccacaggaatctttcacatctgcttataatggtttttcatggtttgcatttttattaattattcaagcaagtacaatcatttcaatggaatttcattacggtacgattaaaaatttactctatcgtgaatattcaagaacaactatgattgttagcaaaatcatcacattatttattatttctttaatttattttgttattacaattattgcttcaattgttattgggtctttattctttaatgatttaaatatatttgaaagtagcggtaatcaattatctttattgaatcaattattattagttagtttaggcacatttgttggcgtttggttagttttaagcttaacgttgctattatcatctgcaacaaattcaacgggagtagccattgctgtaggtattgttttttattttgcaagttctattttagcagttattcaaacggcacttttagaaaaaatagactggctaaagtggaatcctattaatatgatgaatattatgcttcaaacagttgaaaaaggctttagtaagtcgacaaaattagaacttcatgaattgtttattggtaatattgcttatatttctattttcttaatacttgtagtatttattttcaagaagaaaaatatttagtaacttaaagtattaaatgtctaaatacacacatattccatcgtaattcaaaatcattttcaaatcccttcacccaaataatggtgcggggattttttcatccaaattttggaaattccacattttacatatcgtaattttttaggaaactagtgaatataacaaatccctcctctcatttttaaaatagatatatcacttccccacttttacttaactaaactgcaacggttcctaataccaaaatcctgccctctatttttatcaattcaagcatacttattgaaaaatgttaacgttttcttgataatcattgtaagcgcatttattttataaactaacgtttgaaatatactacaggagtgacacgtaatgactcaaattactgaaaaagaattaaaaaagaagtatttagatttactatcccaaaattttgatactccagaaaaacttgcaactgaaattatcaatttagaatcaattttagaattacctaaaggtacggaacatttcgtcagcgatttacatggtgaatatgaagctttccaacacgtattacgcaacggttctgggaacgtgcgagcgaaaatcaatgatattttcaaagagagactttcaactaaggagcttaatgacttaactgctcttgtctactatccagaagacaaattaaaattgattaaaagtgatttccaaaattgcggtcaacttaatgtctggtatatcacaacaatcgaacatttaattgagttaattaaatattgttcttcaaaatatacgcgttcaaaactgcgtaaagcattgccaaaacaatacgtttatattattgaggaactactgtataaaagtaatgaatatcaaaataaaaaatcatattacgaaacacttgttaaccaagtaattgaacttaaacaggcagatgatttaattattggactcgcttattccgtacaacgcttagtcgtcgatcatttacacgttgtcggtgatatttatgatcgtggaccacaaccagataaaattatggatacactgattaattatcattccctagatattcaatggggtaatcatgatgtgctttgggttggagcctatgctgggtcaaaagtatgcttagcaaacttacttcgaatttgtgcacgttatgataatttagatattatcgaagacgcttatggcattaatttaagaccactgcttactttagctgaaaaatactatgacgcagataatcctgcttttaagcctaaaaaaagacctgacaaacacgaacgtttaactcaacgtgaagaaagtcaaattactaaaattcatcaagctattgcgatgattcaattcaagttagaaataccaattattaaacgtcgtccaaatttcgaaatggaagaacgtcttgtgcttgaaaaggttaattatgatacaaatgaaattacagtttatggtaatacatacccattgaaagacacatgtttccaaactgtcaatcgtgataatccagcagaattactacctgaagaagaagaagtcatgaataaactattattgtcattccaacaatctgaaaaattacgtcgtcatatgtctttcttgatgcgtaaaggctctctttacttaccatataatggcaatttactcattcatggttgtattccagttgatgaaaatggtgagatggaatcatttgaaattgatggtcatacttacagcggccaagaattattagatgtgtttgagtatcatgtccgtaaatcatttgatgaaaaagaaaatactgatgacttatcgacggatttagtttggtatttatggactgggaaatattcgtcactatttggtaaacgtgccatgactacgtttgagcgatactttattgcagataaagcttctcataaagaagaaaagaatccgtactatcatcttcgtgaagatgtgaatatggttcgtaaaatgctcagtgatttcggattaaatccagatgaaggacgcattattaatggtcacacaccagtgaaagaaatcaatggcgaagatcctatcaaggctgatggaaagatgcttgtcattgatggtggcttttcaaaagcttatcagtcaacaactggcattgcaggctatacactattgtataattcattcggtatgcaactcgttgcacaccaacaatttaacgctaaagaaaaaatactttccgaaggtatcgatgaactttctataaagcgcgtcgtagataaagaattacaacgtaagaagattcgtgataccaatattggtaaagatcttcaagctcaaatagatattttgaaaatgttaatgcatgatcgttacttagactaaagacgacatttgatgcatgtatcgtgcacttatttagtggtactgtgtttacgcattggctacgcaaacacgatgataaataggcgacctagctacaccgaaaaaaatcccctcactattgcgagtagtgaggggattggtgtatctatgctaattcctgttaactgtattataacaactttacagcaaaaaaatgcaaaatcaactaataaattaatgaaatgaccgacaccctcgcttctactccaatttaacaaaatactatattagtactatatttttcattaacatgtatgttacattttctatattacttaaaattacgaagggacatttttaaatcatgcgtatcttaaaagagtccattattgtggcatttgcctttgttggtgttgtcgttggtgccggctttgctactggtcaagaaattttccagtttttcacaagtcatggcgcatatagcatttcaggcattattgtaacaggactattgattactttaggtggaatggttgtcatgcatacaggtcatcatctaaagtccagaaatcattctgattcaattaactatttcttatacccctctattgcaagaggttttgatattattttaacaatgtttatgttgtctttagctattattatgactgcaggtggtgcgtcaaccattcatcaaagtttcaacttaccgtattggctgagcgcactcatattagtcgcctttattttagcaacactgtttctaaaattcgatcgtttaattgctgtgcttggcggtgttaccccatttttaattgcgattgtcattatgattgcggtctactatttcacaacaagtcatcttgattttactgccgctaataatgatgctcagattcataagcagaaatcattatcacctggatggtggtttgatgcgattaactatgcaagcttgcaaattgctgctgccttcagcttcttatcagtgatgggtagtaaagttaaatatcgtgactcaacgttatacgggggcttgattggcggtttaatcattacatttttactcatgatgattaatctaggtttaatttctcaattcgataaaattaaacacgtagatctacctacattaaaattagcgacacaaatgtctccgtcaattggtattattatgtctgtcattatgatacttgtgatctacaatactgttgttggattaatgtatgcatttgcgtcacgtttcagcgttccattcagcagacgttacttcatcattattattacaatggctgtcatcacttatattagtacatttatcggtttcatttcattaattggaaaagtattccctattatgggattgttcggtttcatcttactcatacctgtactctataaaggtttaattaagcgtattaccggcaaatctcatatcgattaaaatatctatactattgtaaaatttagtacagcacttcaaaatcaaaaaagcgggcagatgaaaagtaaaaatcttttccatctgtccgcttcttaatagaactgttatttcccaagtatttgttgaccagccgttaatccagtttctgtaatttcatggcccttcacccaaacttcttcgacttgtgccccacgtgtattaaacaagttaatgacttgttcacttgcagctaatggcacaattggatcatgtttccccatagaaagcaacacactgacatctgataaatcctttgttgacgttacttcaactgggtataacggtgcatataacaatgcttttttaaatagtgcttctgaacgcaacattaagttaatcgctatatttgatccatttgaaaatccaacaagtactgctttttcaatatcaaaatcataacgttcagcagcttctttaatgaacgtcaacaattcttgtccacgaaatgccaaatcttcttcatcataaacaccttcaccaagacgtttgaaataacggttcatcccattttctgaaacttgtcctctaatacttaacaagtgataattttcattcaatgcttcgcctaacggtaataaatcgaactcatcaccacctgtaccatgcaataatattagtgttggcgcaccattttgtccttctctaaaaatatgttccatcacaaatcctcctcattccaattaaccatgttgacgcttcgtattaaaaggtctaacttccgattcaatatattctcttttattttctaaaaatggtggtaaggataacccttcgcctaatgtttcataaggttcatcttccataaatcctggtccatctgttgaaatttctattaaaatatgccccacacgtgcatataatgcttcaaaatagaaacgattaacgatgcctgagttattaatacctacctctttatatttcgttgcccacgcttctattgcatcatgatctttcacacgaaatgacacatgatgtacctcaccataaccttgacgtgctgctggccctttatcatcttttattaagattacctggccaccattgcctccttcgccaacttcaagtaatgcgacattatcttcatgcgcaatagttgtcataccgtaaacagtctctaaaatatttttaaagtcgtcaaaataacttactttaatttcaatggggcctaatccataaatcgctttatctactggaaccggtccattcttccaaggtacaccaggtgctaccccttcatttaactcatctgaaattaattgatacacttggccatcgacttcttcaaatggcaacacttttttaccaaataattcttgaataccttcgtgtttaacaccaaactcatcaaagcgctgttcataatatgttaatgcgtcatcgttaggcactctaaaagacggtcttgtaatggaatttgttcctgcctgcccttttgtaatatttggaaaatcaaagaacgtcatgtctgtacctgccgaacctacatcatctgcaaaaaaagtatgatacgtataaatatcatcttgattgactgtctttttaactaaacgcatgcctagtacttctgtaaaaaatttataattacgttctgcatcatctgttattgcagtaacatggtgaatacctagtaattcatgattatttatcattttatataccctctttatatttttagtgcatttatctcgaaatcgagatactttaatgtaaatttttagtgcacgccttacacttctgtagattgtgcacttagtttcttaaacgcttgttgtaagattgttaattcatcctttgttaacacatcaaacgcttttgttaatgtctcagcatgcttagggaaaatatctgccatttgactttgacctttttcagttaaacaagccatatatacacgtttatcatctttatccttttcacgtgtaatccaacctttgtcctctaattgacttacaacatatgaaatgctgctacttgcaattaatacgcggtctctaatacgttgaattggttgcggacctttattataaagcaactcgagcactgcaaattcagtaatatttaagccatatcgctttacgtcttcttttgtaatttgctctaatgtgtctaacgccctattcattccgacaaaaacattgagagattgtttcgttcgatccatatgatcaccaacttttttattttatttcgatttcgagataaattatatagctgaatagatttaatgtcaagatacgtgttttcatcttcatttcaaactgtgcttaataaaaacgactacatagatgtggcaatgtcgtcacatgactgtcatgcacctttgacttcgtttaagttaaaatagaatagggaaatactataatcaatcatgataggagttgatatgtatgagtaaccttgaaatcaaacaaggcgagaacaaattctatattggtgatgatgaaaataatgctttagctgaaatcacataccgttttgtggataataatgaaattaacattgatcatacaggcgtatctgatgaacttggtggtcaaggtgttggcaaaaaactacttaaagcagttgttgaacacgctcgagaaaataatttgaaaattattgcctcatgttcatttgccaaacatatgttagaaaaagaagattcatatcaagatgtatatcttggttaaataaattttgcgatggtgcaactgtaccatcgcttttttgttcgcatcaatataaaattgcaaaacgactagttattttgcatttcaaactttatgctatcaattcattttcttttctggtatactttttatactaaattatagaaaaatagaaaaagaggcgatgcataatggcatttcacgataaaacagcaacacaagtgacaaacattgtactgaacgtaagagacttagacttaatgacaacattttacaaaaacattttaggactatccgttaaaagttctgacgataatacaaccgtattatctgttgggactggtggccatactctaacgttacatttattagaagacggccgtcagacttccccacgtgaagcagggctttttcatatagcatttttattaccaactactgaggatctagctaacttcttatatttcgtggcacaaaaaaatatgggcatcggcgctggtgatcatttagtaagtgaagctttatatttcaacgaccccgaaggtaatggtattgaagtctatcgcgatagaccttcatcttcatgggaatggcaaaatggcaaagttaaaatggatactttagaagttgatagccaaaccttattaacacatcgtactgatgaaggttggcaaggaatgccagcaaaaggcatgattggacacttacatttaaaaacacatgatttagacgcagcatatcaatgttacattgaacaattaggattccaacatgtgtctgattttccacgtgcgctatttatgtcaacgaatcattatcaccatcatattgctgctaatacttggcaatccaatcaagcaagacaaaacaattcacaaagttatggattaacacatgttgatatttatcaacccgacgcctcaacacatacatttacggcaccagaagggtttgacatcacagttcattcaaatactgaccttgttccagaaaaataatcatccatactttattaatacaattttttcacgcaaaagcctgcgattcatttatgtaatcgcaggcttttttattgctaactttttaattttatatatttagacatacggtattctatttattcttttggtccaacccattcaataacatcttcataagcttggcgtgttttatttttcggtggctcttgttatctgtagccaaatgcgaccatcactgataaaccaaattgctcagtatctaagatccctttatttgctaaaatgtctgtcactgtatccagactaaaaccttccatcggacatgaatcaatacctaacaatgcggctgtcgtcatcatattgcctaatgcaatatacgtttgtttacttgaccagtcatacaaggcttgatcattatcagaaatatggaaatctgcttggaatgcatcgaatttttgttcaacagctggaatcgtttgtgcctcatattttttaatatctcttaacatatgttgtacatacggtgatcttgacgttacatttttacgcgcaaaaattagcacaaaatggctcgctgtatctaattgttttgctgcgccccaactgtgcgcttttaattcatcacgtaacgcttgatcttgaatcacgacaaacttccaaggttctaacccaagagaacttggagacaatctacctgactctaatattgtttcaaaatcttctttcgaaactttcttttgtggatcgaattgcttagtcgcatgtctgaaatgaaatgcatccataattgtttgattcatattgctcattgaacatagcctcccatttttatatttattgctatacaaattatacttcatgttttaaaaagactaaagtaatccgtttgcaattcactataacttgtgcacatgttataagttttctgcaataaaacacacttttgaattttgggaaatttagtgttataatatatttgtgatatttttcacaattaaattgtggcgtgattttaatgtgcataatctttaatttcactcatttacttttcaatcttttaaaagcgaggtttttaataatgacaaaaattatgttctttggtacgcgtgattatgagaaagagatggcattaaattgggggaaaaagaataatgtcgaagtaactacttctaaagagctattatcaagtgctacagtcgatcaattaaaagattacgatggcgtaactacaatgcaatttggtaagttagaaaatgacgtttatcctaaattagaatcttacggtattaaacaaattgcacaacgtactgctggatttgatatgtatgatttagatttagctaaaaaacacaatattgtgatatctaacgttcctagttattcacctgaaacaattgcagagtattctgtttctatcgccctacaattagtgcgtcgcttcccagatattgaacgccgtgtacaagcacatgattttacttggcaagcagaaatcatgtctaaaccagttaaaaatatgactgttgcaattattggtacgggtcgtatcggtgctgctacagctaaaatatatgcaggatttggtgctacaattacagcttatgacgcctatcctaataaagatttagactttttaacttataaagatagtgttaaagaagctattaaagatgccgatattatttctttacatgttccagcgaacaaagaaagctatcatttattcgataaagcaatgtttgatcatgtgaaaaaaggtgcaatcttagttaacgcagcacgtggtgcagtcatcaatacacctgatttaatcgctgcagtgaacgatggtactttgttaggtgctgcgattgatacttatgaaaatgaagcagcatacttcacaaatgactggactaataaagacattgacgataaaacattattagagttaatcgaacatgaaagaattttagtaacaccacatattgctttcttctctgatgaagcagtacaaaaccttgttgaaggtggtttaaacgcagcattatctgtcattaacactggtacatgtgaaacacgtttaaattaatatatatatttaaaagcaaaggcgcgccatgtgcctttgctttttattttgtatatctgtatcaaaatcgatttgattaaaatccgctttattttatcatcttttcaaatgattttagtgcgcttattttactatggcattattgcctaacctgtttgagatatattaatatttgatgattcgtattcaaagttttcatttaacatgtatttagtatcatgatagctgcttcattgatgatatactacctactttttcaacacttcttgttcgataatcgttaatacaccctgcttatcattacttggagcgacagcagaggcaatattgaacaattcttcatcatgactattttccatcacataactatgcttagcgaacgctaacatatctttatcattattcgcatctccgaaggccatgagctctgaaggagacatttcccatttatctaacaatcgttttaatgcctgccctttagtcatgtttggcataataatatcaatgctatcgttcccacttgagacaagtttaatatcattgctgaattgcgttgctacttcttcgtcaacattcggatgcgtctcacgattaatattaaatgctattttgacataatcatcctcaggtaattgctgtagactgtcaatttcttttaactgatgataataaaatctcgtatcttctttaaacgcttcagaagtatgttttaaaatatacgcgcttttcaaaccacagatgacgagttgatcaatactttgcttcatatttaagtaatcaacaacctgttgaaacacctgacgattaaagcttttataattatataactcattgccattataaataactgcaccattttcagaaataaaatacatatctctatccccgaaaatagacttcaacttcgcatattgattgccactcgcagcaataaatgtaatatctctatttctaagttcagtaaaaatcgcttcaaatctaagtttatcatatgtcttttttgaatctaaaaacgtcccgtccatatctaccgcaatagccttaaccatgattatcctcctcattgctcttttagtcgtcttcattatatccatctcatgacaagcaatgaagtttgtcataccacaatgaacctatattcacattttgaaattgctttcatatatgcaaaacacattacactggatatagcattcagaggcgaacataaatttcagaatattgtaaaaatataacgatatatttatcatttagacaaaatatagtgtgatatactaatttataacatctatacataatgtgaaagaatttttaaaaatacaattaaatatcggtgtaataaatccctttatacataggagttgtatacatgaaactaaataactattctttaaaagttaaaaacaaacaactagttgacaattgtgatttaaatttctatcttggtcagatcaatcacattgttggtaaaaatggtgtaggaaaatctttattagctaaagatttcttactaaataatagtggaaatatccctaagtccatttctcaaaatgtaaccttaatatcaagttcatcaaatattcctaatgatataacaaaagattttttattatcattgttaaaatcaaaatttgaaaacaatcgacaaacattcgataagatttataacatactaaacatcgaagcaataccgtctaacgtactactaaaaaacttgagtgatggtcaaaaacaaaagcttaaattattaagtttcttattggaagatcatgatttaatcatattagatgaagttacaaacgctttagacaagaaaacagttaatgaaatttatgaatttttaaatgattttattcaaagccatcaaactaaaactattatcaatattacacataatttatccgatttaagtgctttgccgggtaaatactttatttttaaagaccttcaaatagaagagtaccaatcaaaagaagaagtcataaatgattacattaatttataattgaggtgtccactttgaaattagaatttaaaaaaagtatttccaataaaattatttacacgcttgttgtgctattcacattccttttcttacttgggtattttttaccaataggtatagacaaagttaaaagtttaagctatagccagtttttcttcagttcatatactgttgcaacgcaattagggttcttactattttcatttgttattgcatattttattaataaagagtattcgaataaaaatatcctgttttataaattgattggcgataatatctttaccttcttctataaaaaggtagcagtgttattttttgaatgtttagtgttcataattctaagtatcactattatttcaattatatattcggatttctcacattacttactattaataatcttattttcactcgttatcttacaatatatcttagttgttggaacgattagtatggtttcacctaacattttaatcagcttaggtatcagcattgtatattggattggttcagtcatcttagttgccattaataaaaatatatttggtatcgttgctccatttgaggcgagcaatacgatgtatcgtgccgtagaaaaaatattgaataacgagtcaacatttatgtgtcctactgaaattataaatatagtatcattcttcgttcttctatttatagttaatactattgtcttattactaagtagaaagagatggttgaaaatcggtatgtagtataaaaaaggagcggtatacattgccgcttctttttattatgtatttttacaatctccaccaatgacacgtcgtcattgctacctcataccaaacaaaaaacagtctcgcaatcaagactgttttccactcaatatattcatccattagcgtaatagattatttgacttctgtagctacaaagattttacgtttttcccaaacgcctgtcttttcattgtaatcatcacaagtaattaatgttaattgtttatctttacctttttgttcatctagaactcctacatctgtaggcttaacatctcttatacttgtcattttatacttacgtgtttcattaccaactttaaagtacaccatactaccttttttggctgctttaagatttgtaaattgatagttcggacggtcaatgaaagtgtgtcctgcaattgaaatattttgatcatctagtgattcattttcttctgcaaagcttacacctctatttaattgttcaggtgttgctggtcctggatatactggttctttaatatcagcatctggaatttcaatatagcctgccactttcgatttatctttcggaatttgaggtttagcttgctgctttttatctttactcgcctgttcttttacatttttatcatattgttcaatcttttcatctttatctttatcgtgaagataattatcgatatgtggtttagcaaacaaatatgctgccactaggataagtaccacaccagcgattgtcattaatcgatttgtccattttttcatacgttaaggctccttttatacatttcacaatgcctgttaacatttcatatagtataccattaatttcaaaatgactcatagcaattcattttatactataaaatttacatgtatacttttacgttagatttcattacacatatttgcattcaaataacgaaacgcttttaataattactaagggggaattgatatgattagatacgctaaaaaagaggatttaaacgctatattagcgatatacaatgatgccattatcaatactacagctgtttatacttatgaaccacaaaccatagacgaacgtgtcgcatggtttgaaacgaaacaacgtaagcatgagcctatctttgtatttgaggaaaatggaagtgtcttagggtttgcgacgttcggttcatttagaccttggccagcatacctatatacaatcgaacattctatttatgtcgatgcttcagctagaggaaaaggtattgctagtcaattactacaccatttaattgtggaagcaaaagctaaaggttatcgtgcgctagttgcaggcattgatgcttccaacaaagcgagtattcagttgcatcaaaagtttgcttttaagcatgccggcacactgaccaatgtaggttttaaatttaatagatggttagatttagcattttacgaattagatttacaagactagtaatgtttgaatcacataatataaacaagacaaccatgttaattcccttaacataacaagccaacatataaaattttaaacttctcaggggagtgggacagaaatgataaagagccactaatgatttattatgtagtggttcttacacattagccacagctaatgtgtacttaaaaataggaatacatgagtaaaactcatgcataagaaatactaatttctatagaaaaagtatttctttatcgtcgtcccaccccaactcgcacattattgtaagctgacttttcgtcagcttctgtgttggggcccaaaaagcttgttacaagcgcattttcgttcagtcaactactgccaatataactttgtagagcatattacattgatttacattgtcccttttatttattcttttcaaatactatccccatagctttgatttaacgctttttctcaataacaaaacgaatatagtagaacatgaaaacgataatcatgctgagcgataaagatttaaataatagattgacccacgttccctcagtcgtatatccatatgtaatcgttgtgttaatgatgaatgctataaagatgattgatagtcttagcatatcatcactccttttaagttattttagatatacgggggcgcttttgcaatcactattttgattagtatgcattttccataaatctttcaacttcttcagagataattaagaagcatctatctggtactaatgatccagacagatgcttcttttttatcaatattttattgttatctcattaattatttttaaccatatcttcagctgtgccaaagattttacgtttaattgcttcgccagttggtgtgcctgctagtccacccaatccagtttcacgtaatgatgcaggaaggttacgaccaaccttatccattgcttcaataacttcatcaacagggattctactttcaatacctgctaatgctaaatctgctgaaattaaagcgttacccgaaccaattgcatttctcataacacaaggaatttcaacaagtccggctactggatcacaaactaaacctaataaattacttatcgctaatgccatagcgtgcccggatgcttctggtgatcctccgaatatagctactgctgcagctgcggccattgcagatgctgaaccaacttcagcttggcagccacctgttgcaccagctacacttgcattgtttgctacgacacgcccaaacaatgctgaagtgaataagaaatcaatcatttgctcttctgttaaatcatgtgttttttctaatttaaaaagtgcaccgggaatggtacccgaggaaccagctgttggcgttgcacaaataatacccatcgcagcattgacttcatttgttgcaatggcacctttgactgcgtcaatcatttcatatccagacaaagcatgatgtgtttcattataatcacgtagtttagcagcatcatgaccagtgtagcccgttacactttcaaccccatcacctgtcgtccctttgattactgcgtctcgcatgacatctaaattttgtttcatttgcgctcgcacttcatcacgtgatttaccgcttaattccatttcttctttaaccatgatatccgcaaatgacatattattttctacggcataatctatagtctctctaattgaatcaaacatgtttattccccctctaatttatataggaaacgtttacgtcactgtatttctctttaattgtatttaatgttgattctgagattgctttatttaatggtattacaaccaagcatttatcttcatctatcttaataaattcatctttacagtctaatttcatatcgttgatatcattgatgaaatgatttacttgtgctttagtcatatttccgtcaacaactaaaattggtaatccatgatttaaatctacttctagtccatttatatgaatacctttaattttaattgtaccaccaccgattgaaataccgataatttcaatgtagcgaccatcattacgagatgatttgatataagcacagtttggatgttgaccaatactatcgccttcttcttcgatgatatctattttaataccatcatcagctgcaatttctaatgaagatttaattcggttatcaaatgttgaatatcccattgctccacccacaatagcgacatctgtaccatgtccttggtgtgtttgagcaaatgattcataataatgtatttcaatatttttaggaatatctcccaatattgcgcgtgctgaattcccaatctttactgcaccagccgtatgagaacttgaagggcccatcataactggtccgataatatcgaaagcactttgataatcatagctctttgccataattaaacactctccttaatatgattctttttgctcggcattttaaagttgatattcattaaattaaacttattaattagtgttccaataatataggctaagacaatgctgacaataatcactgttgcgattgttacaattgatgtcactgcattattaaagccaaacaatacgatggcgcctgcaattggtgttgccatacctttgacacctattactagtccgctaaatgtcacgatacatgcgttgacgaccccaatcagtgcatttgtaccatatagttgtactggatattgcgctattaaatcaatttgcgtcaatggctcaatacaaactgcaaatgcttttgacggtccaccaatgtttaattttcggaataaaataaggttaacaaatgagctacctgtacatgttagtgctccaatagccataggaacacctgtcagtcctaataaacttgttaataccattgaacttagcggtgtcatacctgtaacaggaatcactagtcctaaaatgaccgctaatgcatatggattgttatcacctaccgcagtgacagcactacctatttgttttaatgttgctagcacaccaggtgtaatgattgatgcaagtccgaaagcaattgctggtgcaaataagatcaccacaattaagtccaagccttctggaactttcttttcaatccatttaattaaaaaagctacgccataagctgcgatgaatgctggtaataatttaaagtcatgtaatactaaaccaacaatgaccgcaaatactggtgcaacgcctaagtttaagcacgttagaatacctactgcgataccgcttaaacttcctgctaaatccccaatatcttgtagaaatttaatatcaaatacgccaccaatagcataacttaagaatgcttgtggtagaaatgtcgcacaagctgcaccggataatgcttgtagtccttgtttaccgtacggtgcatactttaaaaatagcgtcatgatcactaaaaccaagactaatgtgcctacacctaacagaatatccatttcccaaaaacctctctctatgtttattttattttcagaccataaacatcgtacacccttaagaaaacgttttcaacttttatctgttatcaaatcaaatatttaagtgaaatatttgatatttgtgaaagatttttaaaatggattgtttcaaaaactacttatgttgtcgttaatatttactaattaactttttactctatatttcaaacagttgtgtgacagttttttgataacttttttacatctgaaagtaagtaatatttctaaaaacttttaatatttatacactttatctttcgagctatttattttttgtttttgtgctgtgtttataaaaccgcacactatattcaaaaataacttattacacatatatttgcaataagataattaaagtaggatattatttttagttttctgataggaatgatgatagtctataggttgaatctttacttttttttaaagctaaatttacatcaacttaacaatggttggttatactgaagatgaaaatatttagtataacttagtggaggcgataaaggtgcaattgagtcattccgttaaagttgcaatttctatctatttagcacttatctttataacgttcacttcttatttagtcattattttatatacgagtatgactggacatgatgtatcacatttcgtgttagatagtcagcattctcatcatggatctcttacgcaaaaacatttgagtcttcctgaaatctcatttaaatagtttatcctctgtgtttcaacattcatttcccatatcgattcatttatctatcatctagaccactacatcttagatgatttttttattttctcatttcactctttcttaaaagtcgatataatgaattaaatcattatcatacaccgacatattttatgttgttggtgttaagttttaaaggggtgagatacttggcgaataatcattcagctttgcgtttaaaaggaattatacttgccattgtcggtgcttgtttatggggattaggtggtactgtttctgatttcttgttcaaatataagaatattaatgtcgattggtacgtcactgctcgacttgtagtcagtggtgttttcttacttattatgtacaaaatgatgcaacccaaacgttcaatatttagcgtattccaagatcgacgtatgttaggcaaattacttatcttcagtatactgggcatgttagtagtacaatatgcttatatggcatctattaatacaggtaatgctgcgattgcaacattactacaatacattgcgccagtttatattattatttggtttgtcataagaggcgttgcaaaactaacattatttgatgtgcttgctattatcatgacactattaggaacatttttattattaacaaatggttcattttctaatttagtcgtcaatcctgcaagtttattctggggtattttagctggtgtagcactcgctttttacacaatttatccttcagacctacttaaccgcttcggttcgattctaattgtcgggtgggcaatgcttatttctggtgttgcgatgaatttacgccatccaatttggcacattgatatcactaaatgggacatatcaattatattatttttaatctttggtattatcggtggtaccgcactcgcattttatttctttatcgacagtttacaatacatatcagcgaaagaaacaacattattcggaactgttgaacctgtcgtagccgttatcgcaagcagtctatggttacatgtggcattcaaaccatttcaaatcgtaggcatcattcttattatgattttaattttattactatcacttaaaagacaacctgaaacattagatgaataagaaaactctgataatcactttagcaagtaactattatttaacaacgtagttaccttataggtgatatcagagttttttattttagttaataatatttttcacttggtataaaaagcgtcgtcgctctggtatcggaaatactggataaatatggaattggtaatatccaggtataaagtcatgttcgatacctttcgcactcaacaattgcgataagttcaaagcatctgggtacagtacttcttttgtaccaacagttaatgtaatacgacctaaaccatctaagtcaccattaattggtgatactttgtagttatctaaaggtgtgtcccctgcccattgttcagctaagaacacactgccatccacacctaccattgggtctttctttaagtagtcaggaatttcaggatgctgcatcgttgcatctaaaactggtgaaattaatacaatatgtcctggttgcacaatatgtttttcttttaacaattgagcaaatgataaagcaatttgaccgcccgcagagtcacccattacaacgatttgtttagaatctgctacttgattcaataaatcatggtacaacttttcaaaaagcacatacgtcgcttgataatcttgatgcggaatcttcggatatactggcatgatgactttagcattgagtgtttctgcaagttcatcaataaattcgaaatgaattttgagtgggtcttggaaccatgcgcctccatgtgcatataatacaacgcgttgatgcttatcttgtttatcgttaacggtataaacggttgaaccgaagtgcttatccacttttactggcatcttaaactgataattggttccctcatattcgcctgctgtctgtggcgccattttttctaatgctttcatcgcttcttctttatacataaaacgacgcttagctctagataatcgtataccttgttctaacatataacttttcacactgcgtttttctttaattctaatatgtgcgtatgctgcaactaaaaatccaaacgcaagtgtagaccattttttacgcatttgtcgtcactcctctttgatgatttctactatagttctactgtaccatgctgattctaattactaccaatatttactgggaaataagttatgatgtctacataatcttagcaatgctaatcatttgcgatattaatgctcatcgacatcgttatttacactatcattcatttgcttaagatgatgttcaaaacgttgcatatcgataaaacgcccttgacgatgcatttcttttccattcataaaaattaaatccacaggtacagtgaaaatatttaattctccagcaatagcttccacctgactttgattaatcacagctaatggcacattgggatatgattgcatcaagtcttcaatttgtggtaaaacggcatgacacacgctacactgatcgcgcatgacatgtacaactgctaacggatattgatgaataaattcacggaatgcttcgacactatttaattgcttaaccatttcgaacaccttcttactttttatattttaaaatgaagtcattattttgttgctaaaatgtcttgaaacacttgtggcacagaggttatcttcttatcactcaatctgtaaaaaccgcctgtctgtgtaccaatacaatgcacgccatgtgcggacacaatttcaaactgaaacacccatttcatcttgcttgctttaactaagtaaatacgacctactggtttgtcatgtattgtgacaggtactttatactctgcttccgttttcataagtataggtgaaatgccttgattgatcattgttgagtaattcatgtgctgattaataaacgctgttctcaaatcttcgaaccatctaatataaacgatattactaacgacacccatcgcatcaatgtcgtaaccattcacttcgatttctttctctgcaactaatagaccttctgttgtcataatgacaaatctccttatcttacaaatagatttaaaatcatgttaatttatttttattactttcatgataaaaatacaagcaattgaactttattacggaaaatcaaacttttcaatgagactattaatttggctagtcgcgaagatgcatttttctaaaatgtgacaaaaacataagcaatgttttctatatctaacactaatatttaacttattatcatcaacacacctgctatacatcattgcgcactaaaaaggcagtagcttcattttaagctactgccttttgtaacgtattctctttcaactcgctacttcgcatacgcactacgaatgactaaaagttcattcatttgatatgctgtttcatttttaatcattatttgactgtcataattagcttacctggatcagcatcttgtacatcttcaatgacaagttctttattttcaagatttgtaataatcattggtgtaacgatgcttggtgcgtgtgctttcaagtatgctaaattcactttcattaatggttgaccttgtgttactttttcatcaacgttaatcagactttcgaatccttcaccattcagtttcactgtatcgataccaatatgaataagtacttcgacgccactttcagattctaatcctatcgcatgtttcgtagggaagattgttttcactgtaccatcaaacggtgctacaatttcacctttttcagggataaagccaacaccatcacccatcattttaccagcgaacacttgatcaggtacttctgataatggaatgatttgaccgatacctggtgcatagatgtctgttgttccaagtgcttctacgtgaactggttcatctgacatttcttcagtcactgtcgtttcacttggtttcgtaatttcaccactcataatcttggccatatcatgtttaatttgatctgattttggaccaaagatagcttgcatattgtttccaacttctaatacacctgatgcgcctaaagctttaatacctgctacatctacttttgatttatcaaccacttctacgcgtagacgtgtaatacatgcatctaaatgtttaatgttttcttttccacccattgcatctaagacatcaaatggtaattttgcgacactagagttacgaatttcagtttcttcatcttcacgacctggtgttttcaatttaaacttacgaattgcaaagtcgaataagaagtaatacacgatagcatatacaataccgactggaataactaataatgcgtgtgaacgatcccagtttaataaaccatataaaatataatctatgaaaccacctgagaatgtcataccaattttaacgcctaataaatgcattactaagaatgatgtaccagctaataatacgtgaattccataaagtactggtgctacaaataagaatgaaaattctaatggctcagtgataccagttaaaaatgcagttaatcctgctgataacattaaaccacccacgacttttttacgttctggtcgtgcatttttataaatagcaaatgccgccgctggtaaaccaaacatcataaatggatatttaccagtagtaaatgcaccagcagtaaatggtacgccatctttcaattgtgccatccaaatacgttggtcaccacgaaccaattcacctgcgtgatttgtataacttccgaattcaaaccagaacggtgaatagaaaatatgatgtaaaccaaatggaattaatgagcgttcaataataccgaatataaacgttgttaatgttaaatttttatttaataagaaattcgataaactatttaatccatcttgaattggtggccacgcaaagcttaaaagcacacctgttgcgattgctacgaccgatgtcacaatcggtacaaatcgtttacctgcaaagaatcctaaaaatggtggtagtgtaatattataaaatttgttgtaacaccatgcggctaaagcacccatgataataccaccaaacacacccgtttgtaacgttggaatacctaatactaaagcatgtgctggttctttcgctgcttgacttaattcttttgcccctttggcatatgagaaaatgtcatcaattgtaatgtgcaacactttccccattgttgcattcataattaagtaacctactagcgctgctaatgctgcaacaccgtctcctcctgctaatccaagtgctgtaccaactgcaaataataatggcaagttatcaaatacaacttgtcctgctgcttccatgaccgacgaaatcattacaatgatatcgttttttaaccatggtgcaatttctactaattgttcgttgtgcattgcgttaccaaacgctaataaaataccagctgctggtaaaatcgcaacaggtaacattaatgctttaccgatacgttgcaattgtccaaacaatttcttaaacatataaacatcccctatctcaatttccgcttccatgtacaaaaaaagcaggcatgaacaaacaagactattctcatagtgcggttgtttgctcatgcctgcattaccagtaacacgcaagtgatatctaattcatagctattatacatatttgtaaaagcgttttcaacaactttttcacaattttatcatcaattcagtacgatcatttgtgataaataaacaaaacggcaattcccattttgttgaaatagaaattaccgtttttatagttcaattcaattgtgataacctttaaatcagttataagaaacgttttgctgccactgaaattggtggaatttgatctaaatctaaatgtttatcttcagtaattgatctaaatgcccacttaccataaccaagcgcttcttcatttacaattttacctggtaatggcgcagcattaggatcaacatatacatctacaatcgttggtacatcttgtgctaatgcctcttcgactatagcatctacttcgctagcactcttaattgtataacctttaccacctgctgcctcagcaaattttgcatgatccatatcagaaaaatcaactgcatattctaattcaccagctgcttgttgttcatatttaataaatgctaactgtttgttattaagtacaaatacagttaaaggtaaatcatattgtactgctgtagcgaagtcttgcattaccatttggaatgcaccgtcaccagcaattgcgatggcttgtctatttggatatgcaatttttgatgcaattgcacctggaagaccgcaacccattgtacctaaccaacttgaaatgatgaacttgttatttacaccaaggtttaagtatcgagttgaccaaactgttgctgtacctacatctgctgaaatcactgcatcatctttaataaatttattgattgatgccattaatcgttctggacgtaatggtttactattattatttttatcttgttccatccatttatcccaaaccgctttacgttctaacgttttgtttaagaatggtctttcagcaacatgtttaatattttcagttaactgatgcaacgcaattttactatctccaacaattcctacattaatattgaaacgatgtccgatatttttaggatttgtgtcaatttgaatggctttaatatttttcttaggtaagtaatccacatatggatagtttgtaccaaccataattaataaatccgcttcctgcattgtttgataagatgttttggtaccgattttacctaagttaccgatactatatggatgatcatccggcaagattgttttagctggtaatgaatgaatgacaggaattttagccatttcaataaattcacgtagctcatctttcgcatgtttcgcacctacaccaattaacatgacaggctttttacttttattaattagtttaaccgcttttttgatgtctttatattttggtgatactactgttggtcttgatgtatctactggtttattcgttgtatctttaattttttcagttaataagtcgttaggacaaataacaacagctacacctttttgttcatatgccgtacgaattgcttcgttaacgatttcaaacacattgtcacctttttcaatttggtgattataaacggctacatcttcacataatttttgtaaatttgtttcttggaatgctttcgttccaagtgctgtactattcgtttgtccagataatattaattgcggtacattatccattttggcatcatacataccatttaataaatgaattaaaccagggccaccgatacttaatgccacaccgattttaccagttaattttgtgtaaccagcagccgctaagcttgctacttcttcatgacgtacatgataaaatttaaattgatctctcactgtacgtaaactatcgactactgcgtcgattgagtctcctggaataccatacaagtgatctatatcccatgcttgtaatgctttaactaatgcttcatttgcttttatttttgccattattactaatagcctccctttctgtctatcattttaaatatctaaattaatagaataataaaattagaacaggtattaacactgaactaataactgcagttaaaatcatcccaattgaactaaatgcaccggattcaatatccatttctagtgctttagctgtgccaaatgcatgtgacgcattcccatacgttaatcctttggcgatagaagattcaaatcttccaaatcttaataacatcgaacctaaaatactaccgattaaacccgttgtgataataaaaagtacggtcatcgtatctgtaccacctagttcatgtgacacttcgatacctactgcggctgttatagatcggggcaataacgttacaatgacgtctttagaatagccaaatgctttaagtgttaagaacactaacatgaaattcagcatgacgccagttaatacacttgcaaaaatgatagagacattgtctttaattttctctctatttttataaagtgggtacgctaaacatacgaccgttgcgtttaaaatatggttgatccaactgccacctttcatatacccgttataactaattccaaagataagtaagacaaaaataattcctaaagatgcaattaatgctggattcaaaaatgggttcggatatttttgttgtaaccttttagcgaaataatataaaacgacagtcaacaaaatcattaataaggcttgcacgtaatcattcataagcgtctacacctttacgatgtttatgtttaacagacattttttcagcaatataacctgaagataatgcaacgatacatgttcctatgataatgactgcgaaaaagagtatataatttagcgtaatttcggaagcaacatccataatacctacaactgacggtatgaagaaaaagaccatcgtctttaataaaaagtttgcaccgtcttctacccaagttagcggtacaatcttaaattgtaatagtaaataaaataaaaatagaccaacaatactgccggctaagggaagatgaaaaatcttttgaatttctgtgccaatataagtaatcacaatgatgattcctagttgtagtagtagtttgattattaattggactttgtgcatggcgccatccctttctaaatatgtctaaattgttacaataactattataaagatggcgtacacaatataaaaatactctttttttatagtttgtattactattttctatggaaacgctctctaaatttcacttcattttcacaaaaaaacactcattatttcaatgacccacgtaatgatgcgccttaaataatgagtgctttattaatatgttagcctaaacggtctttcaaaaattctatccatttcgttgtggcatgacttaattgtttatccttcttccaaacaacacctaattcccaatgtacatgagcatcttcaatgcgtagcagcttcacatctccatttagttgctctgaaattgatgttggtaaaatactaatacctaattcattcgtaactaaatcttctataacatgccattgtgaaatttgcgctacagtattcggaacaaagccaacgtttttagcattttcaataattttatcattcaagtaaaagtctttattaaataaaatgaagtcttcacctgctaaatcttcgagtttaacagtttcatattttgcgagtcgatgctctctgctcacgataagtcgcaaatcttccttatctagggtagtataatcgaaaatatgatgatcgactggcaaagtggtcacgcctatatctacttcatcattgataatttgctgttcaattgttttaccgccattttctatcaaattatatgtaacatttggatattgttgatggaatgcaccaagaatattgataagaatcttcatattcatgactgccgacatgcccatgtttatatgtcctgtttccagtccattcaagcgttccatttcagatggtaaataatcatacagtgcaacaatttctttacttttctcataaaaaatttgacctgcatcggtaagaattaaatgtcttttacttctatcaaataagggcgtgcccatttcattttcaatatctttaattgctttactaattgtaggttgtgcaatatataatgatttggaagcattagtcatgcctccttgcttaacgacttcaataaaatatttcatatgtttgatatccactaacatcatcctaactatttcaacacgtttatttcattatacacaacttcttaaacattcaataaatttagatttataaaattgctttataaaaagttttatgtaaaatacacattcttttatggtattatattaatggctcaagtatattaatcgaggtgaggtattgagcttttacgaatttatgcaaagttttcttggtgatgacacaccattaggtgaattggttgattggattaatcaagatagcaatttccctagagaagtgaagagccatagtgaaatattgtcatattttcgaacaaatccatgtcctgaaagcatctcagtacctgtaattaaacgggcactatcagttttcaaccaattcacaaatgtacaatgatacatgaatacatggagtcacatcatctcatgttagcgctctgattgcagggcgctatttttaatgttattgctacatttagtatattgtgattgctattttctttcagttatagaacaacgtaccttttttttaaatcattttatattttcccactaatatccgctgttaatcaatcctgacatccttgtatcactatgacaattaattgttaaatacatgaatttctacattttatgaaaaaatccatttttattacaattcaacactttatatgacaacttcattacagttacttttattgttgattgcttacattgttttctaaaaaaaatttgttatcataattaacgttgaataaagaaaaaaattaacttgggagataaaaatggaatataaaaagatactaattcgtttattaattgcttttgcagtacttttctcagcagatttcacttatcaatccgtcgaacaaacgcatcaatcgcatgccgcagttaattattatagtaaaaaccaatgtacatggtgggcatttaaacgtcgcgcacaagtcggtaaacctgtttctaatagatggggcaatgctaaaaattggtattacaatgcacgtaaatcaaaatatgcgactggtcgtacaccaagaaaatttgctgtcatgcaatcaactgcaggatattatggacatgtcgcagttgttgaacaagtatataaaaacggtagtattaaagtttcagaatacaacttttatcgcccattaaaatacaatacacgtgtactaagcaaaaaggcagcacgtaactttaactatatttactaatcaaaaaacttctatcacgaacgcttcaatttcctgtatgcgtgtgatagaagtttttattttatgaaattatattattacttctacaaatttcaaattgccgtaattgaacgtatatttcttcttcaactattatttcatctttagcataatctatatataaaattttatgctattatttaaataattcgctataacttaacatacgttttcgatataaaccttgttctaaatctcaataattttttgctgttttcatcgtcattagttaaaaaaataatttaactgagtttttgagacctgtttaaattgatgactcaaaacctttatccccttttcactcggtttaattgctttaatatttaacacagtctcattgtaattttgctactaagtttgaaatatttcgattcgaatgtgaaacatcatttattattactttcgacagctagaaaaatattgttaaaccaaaactataattaccacttttatatagaactatatataaattttaactttgagacagaactgctagtcaggtttatgaatatatttctttagtttacttgatatacttattggtaaatcattatttatttgaagagcatttataacaaaaagtataatcccagttatagcgattccatgaccatttttatcagtcaaagattcatcaacaaaaactttttgataaatttatatatttgtataatttattatggtagatatctacacccgtatctataacagctacagttatcattgcgtcttatccaaatagtttttaagaaataaatataattcattaatatcatggctatttgtaacgtcagtgcttaagaccttgtcaattattgttttatctgtttctaagagcccctgattttctgcatacatattttgtatatcgctgttaatctcatttaattttttaaatttttttctaacctttttcaaaataaaatgctctttaattccatctcttaaatacatataaatctctattataatctccataaatgtcatatctcctctctcaaaaaacattatactcaatatattaaaaataagaaaggttttttcagaatttttagtattttcagatatttattcttaagtatcttattattacttctttttaacgctagtggaataattaataataattgtatttaaatgcaatgctgttgttctttcatacttacaagcaagtcataagaaatgagaaattaaattcttatatgatgaataaatgatgactgcagaagaaattgctaaaaaaggagtggagtgaggcattctactgttcatattgttaacaaatatcaaaatgataggaacttgaagaatctaagactgttaaaatcgagacaataagaaactcgttccaaatttgaatcctataatgaattcgtctcatgaagaagttatttacttttcattagactgatttactaatcaaaaaacttctatcacgaacgcttcaatttcctgtatgcgtgtgatagaagtttttatttttgttcatattaatttatctaagcgctacgatggactgacttaaacttttctttaaaatcgctattcgccatttactattgttgtctaatttcttgtaaaatatgttccgctgcttgtgtatttgcacggggttcttttttcaaagcttcagctactttagcaatttcatcaccttttgcccctacaacgatagctaatgatttatattgtaaactcatatgaccttgttgaataccttctgacacaagcgcgcgacatgctgcaaagttttgcgctaaaccaacggcagcaactacatgacctaattcttgtgctgactctacatttagtagctctaatgaagctttagcaattggtaatacttttgtaccaccgccaacgattgccaatgtcataggcacttcaattgtaccaatcaatcgttgacgatcttgatcgtaacgccatgtagcaataccacgatactgtccgtcacgactcgcgtatgcatgcgcacttgcttctgcaccacgcgtatcatttcctgttgctaaaacaacagcatgtatgccattcataacacctttattatgtgttgctgcacgatgaatatctacttgggccaatacagaagcacgttccattcgtttggcaacctcttctccagttctctcgccccttgctaaatctttaacatcaatttcgccttgaactttaacaacggacgctgttgcatgattggataaaatactcattaaaatgtcgctttgcggaaattcattttttaaaaatgcagttatggcctctaaaatcgtattaagcatattagcgcccatagcatctttcgtatcaacaaatacttttaaagatagtaactgttgctcaggaaatgtatcaatcgctatacgttggtaaccaccaccacgcgctttaatagaaggatatgcctcatccgcaattttatgaatttgcttttctaaagctttaatgtctgctgataatttttcagtatcgtcaacgccatcaaagacgatttgacctatcataatacgttcagaagataccgttttaaatccgccagtctgattcactagctttgcaccataactagctgcagcgacaactgaaggctcttccaccatcataggtacaacatatgccttatcgtccacaatgatattcggtaataatccaacgggtaatgcaccttgcgcgatgacattttcaattaaactattggctacttcttcatcgattaatggatgattcagtaaaatgtcgaattgttcttctgataaccattgcttatcaaccaattgttgtaacttttctttacgagataaatgtcgaaaattcttatctaaattttgcatggacgtactccttttacttcacataatttttaacatttcaatcactactatttttaccacaaaataacgtcattcgtcttaaaattcaattgaataattgtcgttttgactttaaaataaaacaaggtaaattaaaacgcttacaagaaacgacaaatcatttttaaatttagtatatttctttgtataaaattagcatattctgatatgatacaagtgttgcttttataaatttgaaaggatgtaaaaccttatgacaataggtatcgataaaataaacttttacgttccaaagtactatgtagacatggctaaattagcagaagcacgccaagtagacccaaacaaatttttaattggaattggtcaaactgaaatggctgttagtcctgtaaaccaagacatcgtttcaatgggcgctaacgctgctaaggacattataacagacgaagacaaaaagaaaattggtatggtaattgtggcaactgaatcagcagttgatgctgctaaagcagccgctgttcaaattcacaacttattaggtattcaaccttttgcacgctgctttgaaatgaaagaagcttgttatgctgcaacaccagcaattcaattagctaaagattatttagcaactagaccgaatgaaaaagtattagttattgctacagatacagcacgttatggattgaattcaggcggcgagccaacacaaggtgctggcgcagttgcgatggttattgcacataatccaagcattttggcattaaatgaagatgctgttgcttacactgaagacgtttatgatttctggcgtccaactggacataaatatccattagttgatggtgcattatctaaagatgcttatatccgctcattccaacaaagctggaatgaatacgcaaaacgtcaaggtaagtcgctagctgacttcgcatctctatgcttccatgttccatttacaaaaatgggtaaaaaggcattagagtcaatcattgataacgctgatgaaacaactcaagagcgtttacgttcaggatatgaagatgctgtagattataaccgttatgtcggtaatatttatactggatcattatatttaagcctaatatcattacttgaaaatcgagatttacaagctggtgaaacaatcggtttattcagttatggctcaggttcagttggtgaattttatagtgcgacattagttgaaggctacaaagatcatttagatcaagctgcacataaagcattattaaataaccgtactgaagtatctgttgatgcatatgaaacattcttcaaacgttttgatgacgttgaatttgacgaagaacaagatgctgttcatgaagatcgtcatattttctacttatcaaatattgaaaataacgttcgtgaatatcacagaccagagtagtcggtgtatttaaaacacatataataaaacctaaaagcagcagtaagaccacttctaattgaaatcgtcttactgctgttctctatttataacacttcgtattgaatgaattcattatgcctatttgacacattattgaagttttcctaatgcctggatcctttatacgttacggcttcgtgctatgttttggtacataaagctttgacatatcgatattctccaactctaacagcttaattttattattaatcgttccaccgaaccctgttaagctacccgttttaccgacaacacgatgacatggcacgataatagataatggattacttccgactgcacctccaaccgcttgggctgacatttttggcttgttaagcagcttgcctacttttttggcaatagcaccatacgttgttagagtcccataaggaacctgtcttaattcattccaaacacactgttgaaaatgactacctgttggctttaaaggtattgtgatttcaggattgtcacctttaaaatacgcgtctaaccactgtgtcgcctctctaaatatcgctaaagacgtattttcttccctagtaccatcaccttgttgattttcaaacaaaacagcggtcagacttaccccatcactcaaaagttccaatcgtcctacaggcgaatcatagtaactcttatactccataaaaatcccccctttttctaatcatacgccttaattgttaaattagaaaatattcatgttcacattttttaaaaataaataagtcgtcaattacgtatataaacacgtaataccagctatcactttgctgcaatatacagttacatatcttactacacgtgctaacctcttactttgtaaaccaaatcttaaattaaaatattgaaaatgcaatgaatccttaatattttattaaacctataattacttattaaaaataacacacaatattcataaagttttaaaaatattctgttttatcacctactattagtggaaaagtacaattgcaattgtatatagtttgcataacgcttcaaaagtaatttcttttttgtttagttcaaaaaaatttagaggtgatgttatatgaataacggttttttcaatagcgactttgattcaatttttcgaagaatgatgaaagatatgcaaggttcaaatcaagtcggaaacaaaaagtactatattaatggtaaagaagtttcacctgaagaactagcgcaactcacacaacaaggtggcaatcactctgctgaacaaagtgcgcaagcttttcaacaagcagcacaaagacaacaagggcaacaaggtggcaacggcaattatttagaacaaattggtcgtaaccttacgcaagaagcacgtgacggtttattagatccagtcattggtcgtgataaagaaattcaagaaactgctgaagttttaagtagacgaactaaaaacaatcctatattagttggagaagctggtgttggtaaaactgcgattgttgaaggtttagcacaggcaatcgttgaaggaaatgtaccagcagcaatcaaagacaaagaaattatttctgtagacatttcatcattagaagctggaacgcaatatcgtggtgcttttgaagaaaatattcaaaaattaatcgaaggtgttaaatcttcacaaaatgccgtactattctttgatgaaatccatcaaattatcggttcaggtgccacaggaagtgattcaggtagcaaagggttatctgatattttgaaacctgcattaagtcgtggtgagatttctattattggtgcaacaacacaagatgaatatcgaaacaatattcttaaagatgctgcattaacgcgcagatttaatgaagtgcttgttaatgaaccaagcgctaaagatactgttgaaattttaaaaggtattcgcgaaaaattcgaagaacaccatcaagtaaaattaccagatgacgtattaaaagcatgtgttgacttatcaattcaatatattccacaacgattattaccagataaagcaatcgatgtgttagatattacagcagcacatttatctgcgcaaagtccagctgtcgataaagttgaaactgaaaaacgaatttctgaattagaaaatgataaacgtaaagcagtaagtgctgaagaatataaaaaagctgacgacattcaaaatgaaatcaaatcattacaagataaattagaaaatagtaatggtgaacatactgctgttgctacagttcatgatatttcagatactattcaacgattaactggtattccagtttctcaaatggatgataacgatattgaacgtttaaaaaatatttctaatcgtttaagaagtaaaatcataggtcaagatcaagctgtagaaatggtttcacgtgcaattcgccgtaatcgtgctgggtttgatgacggcaaccgtccaattggcagtttcctatttgttggccctactggtgttggtaaaacagagcttgctaaacaattagcaattgatttatttggtaataaagatgcactgattcgacttgatatgagtgaatatagtgacacaacagctgtttcaaaaatgattggtacaactgctggttatgttggttatgatgacaattcaaatacgttaactgaaaaagtacgccgtaatccatactcagtcattctatttgatgaaatcgaaaaagcaaatccacaaattttaacattgttattacaagtaatggatgatggtaatttgactgatggtcaaggtaatgtcatcaactttaaaaatacaattattatttgtacatcaaatgctggctttggcaatggcaatgacgctgaagaaaaagatattatgcacgaaatgaaaaaattcttccgccctgaattccttaaccgcttcaacggcatcgttgaattcttacatttagataaagatgcattgcaagatatcgtcaacttattattagacgatgtacaagttacattagacaaaaaaggtattacgatggacgtttctcaagatgcgaaagattggttaattgaagaaggctatgatgaagaattaggtgcacgtccattaagacgtattgttgaacagcaagtacgtgacaaaattacagattactatttagatcatacagacgttaaacatgtggatatagatgttgaggataacgaattagtcgtaaaaggtaaataacgacactttaacatatcgcgcatcaaaaatgagcatcaggtcgcccttgcctgtgctcatttttttaattatttccctggaaaatgattcgctgtgtgctgttctgttccacaacaatcacgattaatgtcacatgtaccacattttccttgttttgaacgcttgaaaaattttactagtgtatataaggcatatccgaaaattgctaaaaaaattaaaatgttaataatgactgacactttaaccactccttaaacaaataaatgtccgacttgataaaaaatgaatgttaagacatatgcagtgactagaggataggcaactgcaagtgccgtccatttccatgaataagtctctttacggattgctgctactgtagaaacacaaggaatatacaatagtataaatatcataaatgcatacgcagatagcggtgtgaattgattttgaatcacattaacaaggcctgcatcacctgatgaataggtaatcgccatcgaacttacgataacttcttttgctaaaaatcctggcactaacgtagcacctgcttgccatgttccaaatccgagcggttgcactaacataccaaagaaactaccaaccatatgtaaaaaactttgattgatattcacattgataccatgtggtcctacataacttaatagccaaatgactactgagccgccaaaaataaatgtacctgctttacgaacaaagcccttagccttttcccaagtactacgccacaacgttttaatggaaggcacacggtatgttggcaattccacaataaagattgcattatcattttttaaaatcgtcttagtaagtactgtactgactaaaaatgccataataatacctaaaacatacaggcttaatactactaaagattgattctctttgaaaaagatacctacgaacaacgcatacactggcagtctagcagagcatgacatgaatggtgcaattaatatcgttgttaaacgctctttttcattttcaatactgcgcgcagccataatactcggtacattacaaccaaatccgataatcattggtataaaagacttcccgcttaaaccgaacgattccataatacgatccattaaaaccgcaatacgtgccatataacccgaatcttctaataaagatataaagaaaaagagcacaacaatttgtggtacaaagactaatactgatcctacaccagcaataatgccatctgtaattaaatcttgtaaaaatggtataacaccaagataattcataatcgtcttcacactatctgtaaatgtaccacctataaatgcatcgagttgatccgacaaaggtgtgccaatccatgtaaatgtagtttgaaagatcaaccacataattgctagaaagataggcatccctatatatttatgtgttaatatcttgtctattctagagctgaaatattgcttatcttcatctggatacgttaccacgtcttgcaataacgtctcaatataatgattgcgtatacgctccatctctcgacgaacagatacagcccctacttgttcagcaacttgatcacgtaaactcgacaatttatttacaacctctgaattaagttcgtttgcaatttgcatgttatttaataagaattgaatcgcaataaacctagcttgatacttatcatgagatgtctctgtcattattatttgacacatatttttaattgtctcttcaatcttctcaccataattgattttaaaatgcggttgatacccttcccctagatgctttatttcgccaagtaaatattttgttcctttgcctgtacgtgccacaactggaaaaataggtgtttttaactttttcatcaatttatgataatcgatttttatcccgcgctttgtagctacatcaatcatatttaatccgatgtatattggttgattaagttctaacaattgtactgttaattgcatatttctttttagttgactcgcatcaacaatgttaatgattcctgaaaatgaatcgtttaataaatagtctgtcactacagtttcatctttagaaatcggcgataaatcatatgtacctggtaaatcaattaattgtcctacattttctttaagtttccctacttttttctctaccgttacgccactccagttgcctatatattcatacgaaccagttaaagcgttaaacaaagatgttttaccaacattaggatttcctaaaatacaataattttccattcgtccggctcctattcttctaatgcaatagaacaagcatcgcaatgtctaatacttaactgttgtccgtttacttcaataatacatggccctttaaataaacatttttgtttaatcgttatgatagcgtcatctgttaacccaaaggcacttagacgatacaacatattctcattagcaatatccattcgctttattttataagccttattcatttcaccatttttaatgtttaacatactatttcgctctcctattagaaataataatcattatcacttaaaaatcataacccttaaaattgtagctcgcaatactttatttaaataattttcatttttcatgtaaaatttgtgacattgcaaaaatgttttgtataatcacttccatgcaaaaaacctccgcttcaaatgtcattgatagacatttaaagcggaggcatgtacatgttattttatgatttatttcgtagatttttttctaacaattgattgagcttttcaatatttttattcaactgttctatattcgttgcttgttgttttgaatttagttgatgcttgttttgataatctattaaagcatcatataagaacaatgaacttgctgattgctgtttcacttcttggtacaatgccatcgttttatcatctagtactattgaatgtgcatcatcttgcccatgtgcatcttgatgtttcgatacatttgttgcaccttgtggatatactttaaaggttgtgtcgtatgtttccttactatctttagcttcagattcctgtgattcaaccgttttatatttttcaagtgcatgtccttcaatatcaactcgtggaataatgcgattcaaccatgctggtaaataccacgaaccttttccaaacaatttcgttaatgcaggaattaacatcattctgactacgaaggcatcaaagagtacaccaaacgctaatgccatacccattgatttaatcatgacatcttcttggaatacaaacgcaaagaagacactaaacataattaatgcagctgctacaataacaggaccgctttctttcaatcctactttgatagaataatcattatcccctgttttactatattcttcatgaattcgcgacataaggaagacttcataatccatcgctaatccaaataagatacctatagtaataaccggtaaaaatgctagcattggtcctgtcgtttcaataccaaacagacctttcataaaaccatcttgcattactaatgttgtaaatcctaatgttgccattaatgacaagacgaatcctaaaactgcttttaatggtattagaattgaacggaagacaatcattaataagaaaaatgctaatacaacaatgactgaggcaaataaaggtatcgcctcatttaactttttagacatatcaatattaatgacactttgtcccgaaatctccgttttgaacccatatttatcttgtgcatctttatgataatctcgtaaatcatgcactaaatcatttgtactctctgcattaggcccttgcttaggtatcacgaccatcaaagcgtaatcattatctttactcatttgtggtggcgtaacgatatctacatttttcttatctttaatatctttatatacagactgtaaatcttgttgtaatccttgtggatcatcctttttatctttcacatttatcaacatcggtatttggccattaaatccttcaccaaatttatccgagataatatcgtaagcttttttctgtgtagaatctgctggtttaacaccgtcatctggaataccaagtcgcatatgactaactggtattgcagctgctactaatatgattaaacctagtaatactgccgcaagtgcatttcctgtaataaatttagaccatggcgtatcaatatcttttttgaatttagactgtaatttattcactttaatgcgtttatggaaaatgcttattaatgcaggtaataaagttaaagcgctaagtactgcaaaaacaacactaattgccgaagcaaatcccattaccgctaagaagtcaatgcctactaatgataaaccacatactgcaattacaactgttacaccagcaaaaacaactgcactacctgctgttcctattgcaagaccaatgcctttaatgtaatctgtttcagttttcataacttgtcgatatctgaataaaataaataatgcataatcgataccaactgctagtccaatcattacggctaatgtcagtgtgacatttggtatatcgaatgcataagttaacaaactgataatacctacaccagaggctagaccaatcaatgcacttataattggtaatcctgcagcaatgactgaaccgaatgtgattaacagtacaacaaatgcaacaataataccaactagttcagaattaccgcctacttctgtagatgtcattcctgtaccagttaactctgtttgtacattatgattgtcacgtaagtctttcaaatgacttttaacattatctctagagccatcttttaaagatgtttgactaacgtcatatgtgatatctgcaaatgcagttgttttatctttattaatttgcttattttcataaggatctgatattttatcaatgtgcttgtcatcttttttaatatcatctaacgttttcttaatatctttagtaatactcggttgcacaataccatcatctttagtcgtcttaaagacaacacgtatttgtgccttttcactatcttgattaaaatgtttttcaatctttttattcgtatctaacgactctagtcctgtcattttaatatcattgtcaaatttcggtgcatttgtagcaagtggtatcaatattgcagctacaatcactatccatgcaatgaccgcggaccatttatattttgcgatgaatgtccccatcttatataaaaattttgccgaagtatattgcctccttttaaaatcaacgttatagtttaactatacagtgtagattattgtttgattatagtatctatcaccgacctcttaaagaatcaattggaaaattttgtatattaaactacacacaaaggagaaatgtagatgaaagagactgatttacgagttataaagacaaaaaaagcattgtcgagtagcttgctacaattgttagaacagcaattattccaaacgattactgtcaatcaaatttgcgacaacgcactcgtacaccgcacaacattttataaacacttttatgataaatatgatcttctagagtatttgttcaatcaattgactaaagactactttgctagagatatcagtgaccgtcttaatcatccattccaaacgatgagtgatacgattaataataaagaggatttgagagaaatcgcagaattccaagaagaagacgctgaatttaataaagtattaaaaaatgtctgcattaaaattatgcataacgatatcaaaaataatagagaccgtatcgatattgacagcgacatcccagataatctcatattttatatttatgactcgttgattgaaggttttatacattggataaaagatgaaaaaattgactggcctggcgaagatattgataacattttccataaggtcattaatattaagattaaatagtaaattagaggctcataagcgttaccaacattcataataaaaacgatagtgtacacgttaatgaattcgtgtactactatcgttttttatttttatcgtgcttatcgctattaaaataactgatatacaacacataaactatgaagaaaaacataaatccgctatctaaatgactttgactcagttgtttaaatgaccaaattgctaatacaattcccattattattgaaataacgtatctcacattcttatacctagaatccttttctaaaaatatggttgctattacttaatttttaaagttataaataaaaagagccaaccgcaatggatggcccttgttcattatgaagcattagaacatttctgaaacaaccttttgttctaagaagtgtaataagtagtctgggctacctgttttagcgtccgtacctgacattttgaaaccaccaaatggatggtatccaacaactgctgaagtacagcctctgttaaggtataaattacctacatcaaattcgtttaccgctttaatccaatgctcgcgattatttgtaatcactgcaccagttaaaccgtaatctgtatcatttgcaacctcaattgcttcatcaaaatcgttaactttcacaaagccaacaactggaccaaaaatttcttcttgcatgattctatctttagatttaagtcctgaaatgattgttggttctacaaagtaaccttttgaatcatcagtgccgccaccttgttctaatttaccttcttctttaccaatttcaatataatttttaatcttatcaaattgttttttattaataactgggcccatatacgtattgtctacagtattacccaacgttaattcttttgttagtttaattgatttttctaatacttcgtcataaacgtctttatgcacaattgcacgtgaacatgctgaacatttttgaccagagaaaccaaacgctgacgttacaatagcttctgctgccatatctgtatcaatattttcatcaactacaatggcatctttaccgcccatttcagcgataacacgtttcaagaagttttgaccttcttgaacaacggcactacgttcataaattctagtacctgtcgcacgtgatcctgtaaatgtaacaaaatgcgtatctttatgatcaactaagtaatcaccaatttctttcggatcaccaggaacaaagttaactacgccttttggtaatcctgcttcttctaaaatttccattaatttataagcgatataaggtgtatcctcagcaggtttcaataacactgtattacctgccacaactggtgctaaagttgtaccagccataatcgcaaacgggaagttccacggtggaattgtaacacctgtaccaattgatttatagaaatatttattgtgttcaccttcacgatcaagtactggcttgccttgagccaagtccatcattgaacgtgcatagtattcaataaaatcaataccttcagctgcatcaccaactgcttcatcccatggcttacctgcttcataaaccataattgctgcaatttccgcttttcgacgacgaataattgccgaaacacgtaacataagctctgcacgatcatttgctgaccatgttttccaagatttataagcttcgttcgctgctttaaatgcatcttcaacatcttgttttgttgcctttgatgcatttgcaatcacttgtgatgtgtctgcaggattgattgatttaattttgtcatctttgaaaatcttctctccattaatcactaatggtatgtcttgacctaattctttttccacgtctttcaatgctttcttaaacatatccacattttcttggactgaaaaatcgtaaccaggttcatttttaaattctactaccatgtacacttaccccctataaattttgaaagtggtttaaccctttgatttaatgatataacatcatttaaactcattttactatgagtaaggtcggttttgcaatcgctttcatttttatgctttatcccttattctcaagtattttgaaattgattggttactttttaaaatttagaagtgtcatgacaactaatttagtgtttcatcgttcaatgcttctgatggtacctcattatcaattttacgaacgactttacaagggtttccaaccgctaaactgtgtggcggaatatctttggtgacaacactaccagcaccaatcacactgccttctccaatcgtcactcccggaagcacggctacatgtccgccaaaccaagtattactgccaatattaattggtcctgctttttcaaatccttcatttctatgatgaaaattaagtggatgtgttgctgtgtagaatccacaattaggtcctataaaaacattatcgccaattgtaatctgtccaccatccataaaataacaattggtgtttacatagacattttttcctagtttaacgttccaaccataatctgtatcaaaaggaatcgaaatacttacattgtctgttgttgtttgaaataattcatcgattaattcctttcttttatttttgtcactcggctttgtatgatttaattcaaagcaaatatctttcgctcgtgcacgttcattgattaagtcttgatcaaagtttgcatcgtaccatttttctgctaacattttttctttttcagtcattacacctttcaactcctaataacttatttacttgtttaatagttaatcaaataaacattcgcctatgcaactaataagctataacattatgaaatcataaccttatcactcttatctataccattctcgcatcaaatactgctaaagtagtagataaattcaatactacagacgcattcattttttaatctattaacgtaaaatgtgagtaagagaaatataaaggagtatgatagcgatgagaatattaattacaggcacagttgctatcttaatcattctaggtttagttaaaacgatacaagattacgaaatgacaaacgacacaagtcgtcagttgtcagacaacaaagatgacgataaagtcatccatcttaataatttcaaaaatttacatgcgaaagaatttaacccatctgatttcttttaagtcacctaagaattacaaatccagaagtcatttaagttttacctttcattcatacatcctttaatattaattacgacttcttttatatagatgctaaatagagagattgttgtgcaatgtttgcacggcaatctctctttttctttttaaaattggtaaaagtaaaacgcaacgattgacttatatacctatagggggtacattagacgtgtaacaatgaatcacagggaggcaataatgtggctaatacgaaaaaaacaacattagatatcactggtatgacttgtgccgcatgttcaaatcgtatcgaaaagaaactgaataaacttgatgacgttaatgcccaagtgaatttaactacagagaaagcaactgttgagtataaccctgatcaacatgatgtccaagaatttattaatacgattcaacatttaggttacggtgtcgctgtagaaactgtcgaattagacattacaggcatgacttgtgctgcatgctcaagccgtattgaaaaagtgttaaataaaatggacggcgttcaaaatgcaacggtcaatttaacaacggagcaagctaaagttgactattatcctgaagaaacagatgctgataaacttgtcactcgcattcaaaaattaggttatgacgcatctattaaagataataatagagatcaaacgtcacgcaaagctgaagcgctacaacataaattgattaagcttatcatatcagcagtattatctttaccgctattaatgttaatgtttgtacatcttttcaatatgcatataccagcactatttacgaatccatggttccaatttattttagctacacctgtacaatttattattggatggcaattttatgtaggtgcttataaaaatttaagaaatggtggcgccaatatggatgtacttgttgctgttggtacaagtgcagcatatttttacagtatttatgaaatggttcgttggctaaatggctcaacaacacaaccgcatttatactttgaaacaagcgccgtactaattaccttaatcttattcggtaagtatttagaagctagagcgaagtctcaaacaaccaatgcgcttggcgaattattaagtttacaagctaaagaagcacgcattttaaaagacggtaatgaagtgatgattcctctaaatgaggtacatgttggagatacacttatcgttaaaccaggtgaaaagatacctgttgatggcaaaattattaaaggtatgactgccatcgacgaatctatgttaacaggtgaatctatccctgttgagaagaatgttgatgatactgtaattggttcaacgatgaacaaaaacggtactattactatgacagcaacaaaagttggcggggacactgcattggcaaatattattaaagttgtcgaagaagctcaaagttctaaagcgccgattcagcgattggcagatattatttctggttatttcgttcctatcgttgttggtatcgcactattaacatttatcgtgtggattactttagttacaccaggtacatttgaacctgcacttgttgcgagtatttccgttctcgtcattgcttgtccatgcgcattaggacttgctacaccaacttctattatggtaggtactggtcgcgctgctgaaaatggtattttatttaaaggtggcgagtttgttgaacgcacacatcaaattgataccatcgttttagataagacgggtaccattacaaatggttgtccagtcgtgacagattatcatggtgacgatcaaacgctacaactacttgctactgctgaaaaagattctgaacacccattggcagaagccattgtcaattatgcaaaagaaaagcaattaacattaactgagacaacaacatttaaagcagtacctggccatggtattgaagcaacgattgatcatcaccatatattggttggtaaccgtaaattaatggctgacaatgatattagcttgcctaagcatatttctgatgatttaacacattatgaacgagatggtaaaactgctatgctcattgctgttaattattcattaactggtatcatcgcagtggcagatactgtaaaagatcatgccaaagatgctataaaacaattgcatgatatgggcattgaagttgccatgttaactggcgataataaaaacactgctcaagccattgcaaagcaagtaggcatagatactgttattgcagatattttaccagaagaaaaagctgcacaaataacgaaactacagcaacaaggtaagaaggttgcgatggttggtgacggtgtaaatgatgcacctgcattagttaaagctgatatcggtatcgccattggtacaggtacagaagttgctattgaagcggctgatattactattcttggtggcgacttgatgcttattcctaaagccatttatgcaagtaaagcaaccattcgtaatattcgtcaaaatctattttgggcattcggctataatattgccggtatccctatagctgcattaggcttacttgcgccatgggttgctggtgctgcaatggcactaagttcagtaagtgttgtcacaaacgcacttagattgaaaaagatgcgattagaaccacgccgtaaagatgcctagattccttaataatgaaggattcgttggtgattctgagataggctagtgattggctctataatgtcgcggtttacagttggatcttcgctccaactgcatatatagttacacttttcgcttggcgaattagtgtatcttgggagtgggacagaaatgatattttcgtaaaatttatttcgtcgtcccaccccaacttgcattgtctgtagaaattgggaatccaatttctctatgttggggccccgccggcaaggttgactagagttgaaaaaagcttgttacaagcgtattttcgttcagtcaactactgccaatataactttgtagagcattgaacattgatttatgtctcagactctacaatattattacaaataataagtacactatggtttacagttggatcttcgctccaactgcataagagccactaattattataaataataagtacactatggtttacagttggatcttcgctccaactgcataagagccactaattattataaataataagtggctctaaaaggaggtgaatgctatgtcacaagaaattttaaatgttgaaggtatgagctgtggtcactgcaaaagtgctgttgaatctgcattaaataatattgacggtgtcacttcagctgaagttaaccttgaaaatggtcaagtaagtgttcaatatgatgacagtaaagttgctgtatctcaaatgaaagacgcaattgaagatcaaggttacgatgtcgtttaattaggcaatattcaacgtcatcaacaccaaattaaaaaatcgaactgatgagaatcccaacaatccaaattatctcatcagttcgatttttaatttactcgtaacctagtatctccagtctgcaatacatctaatgttgcatctaatgcatcaacaattagattttcaactgcagcttcagtataaaacgcaatatgtggtgttaatatgacatcttccctgtcaatcaacgattctaacaatagatcgttcagtgttttgcccctttgatcacttgggaaaagtttgcgttcaaattcatacgtatcaagtgctgcacctttaatcacaccattgtctaatgcgtctaataaagccttagtatctactaaagaacctctcgcacaattgacaaatactgcgtcctttttaaaatgtttaaataattcagcattaaatagataatgattatatttcgttgcaggtacatgtaatgtcacgatatcagcaccttcaaccgcttcctcaatcgtatctttgtaatcgacatacgttgcaattttagcattaggaaacgggtcgtatgcgaccacatcactttgataaccattggcaaatatatcggctactacacggccaattcgacctgtaccaataacagctacttttaaatctttaatggatttcgataaaatagtaggttcccatctaaaatcatgctctcgcactttcgtttgaatttgattaaaatgacgaaccacattaatagcctggttcacagcaaactccgcaattgaattcggagagtatgacggcacatttgacacaatcaagttatacttgtttgctaactccaaatcatatgtgtcaaatccagcactacgttgtgcgatttgtttaatacctagttcatttaatcgtttataaacatgctctgataatggtatttgttgtgatagcgataagccatcataaccagcgacaccttcaacattgtcatcagttaatgcttctttagtaatatctacctcaacatgatgtttctctgcccacgccttgatataaggcatatcttcatcacgtacactcatgattttaatttttgtcattttaacatcacccttaactttattattcatataaatatgctagttctgttaatcttattgcagcttcgtctaattgctggtcatctaacgccaatgagattctcacataacgattaccattctctccaaatggtttccctggagcaacaagtattgacttctctttcactaaaaattgctcaaattgctcgctgtcataaccaggcggtgtttccaaccatacatatatgccacctttagcatgaaaaaatggcaaatcagcttttgtaagcatggcttcgaatcggtcacgacgtgctttaaatacattgctttgttcttctaaaaaatcatcataatgattcaaagcatatattgcggcatcttgtaatgcaccaaacatcccagcatttgtgtgcgtttggtactttttcaaagcttgaatcatatctttattaccaactgcaaaaccgactctaaaacctgacatgttataacctttagacaaggaataaatttcaatcgcaacatctttcccattttccgaagcaagtatactaggatttttagcgtcgaaaccgaaggcaccataagcaaaatcatgcacgattttagtgtctgtatctttaaatttagctatcgcttcatcaagaacttctttcgtagctgtcgatccagttggattatttggatacgttaaataaatgagttttgttttatctattatttttgaatcaactttggaccaatctggcaaataatgcggcggttctaaattaagcggaacaggcttgccatcagctaaaagtacacctgctaaataatcagtgtagcctgggtcaggtagtaatacatagtctcctggattgataacacatgttggtactgccactaatccattttttgtaccatataaaatacatacttcatcttctttatctaacgtcacattatattgtctttgataaaaatctacaatagcttgcttgaacgcttctttaccatgaaaagcaccatatttttgattttcaggaatagttagtgctttttgaaaatgatcaataataccttgtggcgtgggcccatcagggattccaactgccatattaattaatggcaatggtccatgttcgattttacgtcccatcgttttcccaaaataactatcagggatatttgctaatttgttagagatcatcaaattcctcctctatcattaaacatagcctgggcgactatcataatcctaacaacttgtatcactctcatttagatggttacaatgacatcgccattcaccgttatcttcaacagatcttatgacacacgttgtattgaatgaatttattttcattttaggtaggtacaatattattgtcaatattaggaattttcagattaatatacgctcaatcgttaggatttaactgccatgcatatccgcatgcgcaaccagttagatatgcttatataaagtataacgcccatcaaggtacgtattcaaacgtgaaccttaacaggcgtcattcattgttaaataaaacttcttaagcacatacttatttcactatgccttttacgttccccttatacttttctcacatctttctcttagactactcccttacacgccttgctcaatatctttaatcatttcatctacagttattttcgcactcgttaagacaataggaacgcctgcacctggatgcgtacttgcacctgcaaaatataaatctttataatctcgcgatacattttgtggacgataataattactttgcgctaaagttggcattaaaccgaatgccgaaccaaatttcgcatgatacgtttgctcaaaatcatttggcgtaaagattgtttctgaaacaatatgcgattttatatcttcaaatacttcaatagttgctaatttacgataaataacatcttttatttggtctgttaatgcttcatctgaccaatcgattccgctacctgttttaagttctggtgttggcattaaaacataaatacctgtttgtccttgtggtgcaagagatttgtcagcaaccgcaggaacatacacataaatagaaggatcatgcgataatcgcccttcaaatatttcttcaatgtttcctctaaaatcatctgcaaaaataacattatgaattctcacttgatctgtcacatcaatatctataccgatatacattaaaaatgctgaacaagagtaatctaagtctgcaattttatgtggtggatactttttaataggtgcaaaatctggcattaatgattccgcaacactagggaaatcagccgtacataaaattttatcaaattttcttatgtcaccattcacttttatcgcatcggctcgtttgaatttaggatcaataataatttgctcaatttcagcattaagttcaatattaacgcctaaatctttatttaattgcgctagcccttgagccatgccatacataccgcctttaataaaatgcacaccaaacatcatttcaatcataggaataattgaatatagtgacgggcctcgttttggatcaattcctatgtataacgtttgaaacgctaaaagcttttgtatcttttcgttatcaatataatgttcaattagctgatctgcatgatttaacgtttttaacttagcaccttgcacaagtgacgtcatattataaaagtcacttggtttgcgatacgttctttctaagaaatagcgacgtgcaatttcatattttttataaacatccgttaaaaaggacataaaaccatgcgttgaaccaggttctatactttctagcatgtgctgtaattcagctaaatctgtaggcaccgttatacaatcatcgcggtcaaaatacacatcgtaaatataacgtaattgtctcaattcaatataatcttcataatttttaccacacattgtaaatacatctttataaacatctggcatcatgacaattgtggggcccatatcaaatgtaaagccatctttctttaattgattcatacgcccgcctacattattatttttttcaaatatcgtcacttcatgaccttgagaagcaatacgggctgccgctgctaatcctgtgacacctgcaccaatcactgcaatcttcattattcaaccacctatattctatgatatttactatttatttcatgaaacaactttgcttttttcctcttctccacaaaaacacgttcatgtaatgtatagttagcctgtctcacttcgtccagtatttcaatatatatacgtgctgctaattctatgattggttgtgcttcaatactaaatactttgatttgatccataacatctcgaaaatctttttctgcgatagctgcataatattcccataagtcaatataatgattattaacaccattttggtacacttcagcaatatcaacttcatattgctttaatcgttgcttactaaaatatatccgttcattttcaaaatcttcaccgacatctcttaatatattaatcaattgcaacgattcaccaagccttcttgcgacatcgtaagtctgatgcgtttcatgatcacttaaaatcggcgtcaatacttcacctactgtaccagcaacaccataacaatatccgaataattcagcgtccgtttcaaacattgtaaaatgttgatctttatatacagtatcaatgagattatagaaagattgaaaggcgatatttttatgttgtgcaacatgctgaagggccatcatgattctacgatcactttgaaagtgatgatattcatatgggtatttttcaatagattgtatatcttcttttatttgatttaaaaattgaatatcgccataaacatctatactgtcatcaattttacgacacacagcataaattgcccaaaccgcttttctttgatcttctggtaacaagtcaaaagcgtaagaaaagctttttgaatgtttcttcatgattttatgacaatatttaaaattcatatccatcattgtcatactagtcctcctatattgaaatgccattaccttgatttattgttctttagatatagaatattgacgacctttccattcaactacaccataacgatgcatttgtttccaagattggatgaaaattttagtaaaaaacataaataacaatggatgacataccattaataaattagaaaattggccgacccttcgatgcagataaataaattgtgtagtatagctcaagtaaactgttaacatttttcctacagacatttggcgatattttaaactaagacatagccctaaaatactcgcaatagaaccgaacaaccacaacacaattgctgccatgatcttaggctttgtgccacctgccccagtcgacaaatgctttgtccatccttcttgtaatgactgaaatccttcttgatacatgcgaaatgcaacaaatggaaatccttcataaactgttacgggcaatgattgtgaagtatatgcacttcctaaagcaaatccttcaataatatgacggttcgcacttttatgacctccagttgcataataatcttctttatttgttaatgtcaccggtccaaatgcatgctggttagtccgaccgtcgtctaaggtagaaaatacattcataccaacgactgtcattaaattaaatattgctgaaaacccttcgtagaaacgctttgttatatgataaggctgtacgcttaacaatcctttttcaccttgtaattgatactgattaatcaacgcttcaacagcatctttccttaagaaagttacatcagcatctacaaaagcaatacgattcgtacatgcatgcgtcacaccttgataacaagcatgtgatttcccataccatttgccgtcagcatcatcaacaacatctactacagtcgcaccatatgaacgcgctacacatgctgtttcatctgtcgatccgtcattcataacaatgacatctactggaacttgctgttgtattatcgaatgtagtaaatgacctattcttttttcttcgtttctagccggaataataattgttaatgctttatgattgaagttcagcgttttcgcctttagctgatgtctacgattaaatatcaatgcaccacacgccatagacatggtcactattactgttaatattcgtgataaccatttcatagatatcacttcctattcttcgcttctcgcgcgtttattttgtctgcgacttgttgcccacttaatgtaaccattggcatgccaccaccaggatttactgatccccctacaaagtacaagttttcaaaacactgactttctttaggaaatttaaatcctttgtttttctttttatctgctacaacaccatatattgcaccacgattagaacgataatttttttcaatatcctccggtgtccaaacatcttcataaataatgtgttttcttaaatcagtgagtcccattttttctaatttatccaaaattttatccctaaacttcgcataatcttcagttgtaaaaggctggtcttgaatatatggaatatgtggtaagactttgatattttcataacctactggcgcttgtgtgtgatcagttttattcgtatttactaaataaatggtcggatcatctggcaataccttttcatgaaaaacttgttgataattgagataagcattttccgtaaaaaagaaattatgatgtgctaattgcgggtattggcaagcaacacctaaatgcatcacatatcctgagcttgctggctcaaattcccgctctaatttgtttaatcgttgagtatcaaggtgaagtaaatatttataagtaggtatgacttccatatttgaaataatataatctgcctttacaaactcacctgtatctaatctgacacccgtcacacatctttcatatgttttaatattgtccacacgtgtacctgtatgaattgtgacaccttcttcacgcgctagcttttccaaggcattggctaaatgatggattccaccttctacataccaaaggccttgctcttgttgcatatggaataacatagataatacagctggcgcatcgtacgatgaagaacctacatatttgataaaatagcctaacatttgtcgcaagtatggattcgagatacgcttgtctatggcctgttgcatagtatgtacataatcataattaataagtgcatttaatggcccatgaaatttaataatttgagatagtgtatctaaaccatagttaaaataccctttttcagtaatacgatcgattcgtcttgtataattcaaataattttgcagttcctctatatcctgtttcgacaatatcgcattatgctgacctgtttctttaataccttcatacaaatcgatagtcgttccatctggaaaaaagctacgccattgatgtggcaatcgcttgattgtaacgtagtctgacatttgcttcttgctatattcgaataatttttcaaaaatataaggcatcgttaaaatagatggacctaaatcaaagccaaagtcatctgactcatgacgattcactttgcctcctatatgattattttgttcatataatgagaccgaatagccactttgtgccattcgaattgctgcagaaatcccacctaagccaccaccaataacgatgatatgtttagtcatgacgttcacctcttcgttttaatatgcgtagtaactgcgttaatctcggtcgattatagcgttgcacaataatgattggaacattagctatcattgcatagaaaatatttatatactttactacacgagggcctttattgaatataatgactggaagtatcgatatccaatgaatcaactctgccctctttgtctctataatcattttttcgatttcatcaatattgattgtcattaaatgacgctgatcatatatatttcgattaagcttatgaccatctaaaatcttatgcttccattttcttacgtaaaaccatttgttccaaaattttccatgcttctcaaagttaaatgatttaaatattatatgcttctgacgaaaatacttgtcaggaattcttgtacctaaatttgctatatttagttgaacaattaaccaatacatactacagaaaaatgctgttttgatatattttttcatgattttcatctaaattgaatcactctcaatcatactgacatagtataaattatcattttattacttagttccctaaagatcagtgaataaaccgctctcatttatatttatatttatataaaacaaaaacgccaatactctcatgttagagaatattgacgtcatttgatttacatttgattaatgaatgaaattatatgaacctgcttggtttgctgaaattgtacgagatgtaaccacaccagcaccatgtccatagttcatttctgaaacacgaacagaaccgttgctgttaacgccttcaacgtaagcaacatgaccgtaatagccttgtgttgtttgcatgatagcaccagcttttggtgtattgttcactgtatagccagatgatgcagctgcgctagcccaattactagcattgccccatgttgaaccaattttcccaccaacacgatcaaatacataataagtacattgtcctgaagtatataagttacttcctgatgcataaccattagaaattgaacgaccatttgaagatggcgctgcagttgtagtcacatgaacattattgcttgttgtgctataacttgcacctgaaccaccagtgtaatagttatttgttgctgtttggctattgtttgtatagttattgtattgatatgaatgattatagtagttattgtaagatgcattgttataactataagtattgtagttattgtaatagtatgtgttgttttgcgttaattgacttggattccaatttcctgtccaagtgtaatgataattaccttgtgcatcaattgtatacgtatagctgtatgattgagcgtcattagaattatatccattgttattttgttctgcggcttgtgcatcatgtcctgcaaatgcgatagtggcaagtcctgctgtagcgattgtagctgtaacgatttttttcataattaaatatcctcccaataatcaaaacactctatacatatagtcattagcgactcaattattttaaattttgtattttttatttttttagtatgcaaataattataacttttatagttttgcgacaaaacaaactataacagagattaggtaccttgtggtctttgttatcataatgtaatctgttcctaacaaagcatcattgaatgtaatataccaattagaatgtttacaacactttttctgcaccgttaacatgggatttgaaaataaaaaagcactaaacttttaatgaaatacatcctttttgataataaatatcagaagtaatgtaatatttcaaaagtttagtgcatcaaattatttcttatttgtagcatgtgtttccatcgtttttacaatcaaatcagtcagcgctttactacctgcatattctaagtgaataccgtcatatgcaaagtactccggatgacctgcagaagctttataccaatcgactagatgtacattagagcgcttttcagctgcctcataaattaatttatttattctaccttcataatctctaggtactctaatagaaactaaatatatgtctgcttttccaaaactatccaatagttcatttaattgatctttcgtaaatgccccatttgtaccaagctctactacaactttttgaccttttttagcatagtctttatattgcgatttcacaattggtgtagcatcaacgagttgccgtccaactttaccatcaatttgtgcatttggtattttcttagtaaagacattaccaatatccaccataaccgagtcaccaattaatagtggtgatgactttttaatatcctctttactattcgccgtctgcttatcctcttgcttatcttttttaacgacctttttcttcgttgttttaaattccgtcttcttctctttcttctcagcttcatgttgtttaccaagcgcatcaaattgcccactgagaacgatgatagatggaatcaataataagataactaacacagttctagcaaattgactcttctttttaggtaaaaatgcaaaagctttaaatccttttttacgtataggtgtttcaataaagcgatacgaaatttcagccattaacgctgttaacaaaatttctataatataaacgtataccggtatttgtccttgtacgtaataactgttcacaaaaacaatgataggataatgccataaatataagctatatgatcgtttacctataattagtaaaggtttcatacttaaaaatttagcaaataaactagaaggatgtaccgcaatcgcaataatgaataaagttgcaaatgatataatgtaaaatcctccattatagatccattgatcttggtctccaactataaagaacaaagtcattagaaccgcaaaaccagatatccctataatatctaatgatacgacaatctttttagaaatatcttttttcaaagcaaacggaggccaaataaatgctaatatacaaccaagcaataaagtttgcaatcgtgtatctgtcccaaaatacacacgtgaattatctccagtgatgaaatgaatcactatcataagtcctaaagaaatcaacgatacaataaatagcgtttgaataatatttctcggtttaaatctatgtaataagaacgtgataaccaatgggaaaagcaagtaaaattgttcttcaatggctaaagaccataaatgtttgagtggttcaatagcaaattggttaaaataatctacattctgtgaaatgtaccaccagtttgaaacatagaatatagctgcaatagcatctcgtttcatttgtataatcaattccggtttaaatatcaaggtgaacgtaagcacgacacagattaaaaataacactgccggaatgagtcgtttcaatcgtcgcttccaaaactctagcaaatcgattttttgcgtccgataatactcacttatcaacaaacttgttattaaataacctgaaataacgaagaatgtatctactcctaaaaagcccccacttaaccattgtgcattcaagtgataaataatgattcctataactgcgaatgccctcaatccatctaatccgggtaagtatcgcggggaatacattttttctaaacgtttaaagtcttttgtatccatgttaataaacgccccatttatttttctctattttgtagcatatcacaatatttttgaaaataaaatattgcactgattttcattaattgatttaacccttaattaagatagttttaaattttttattaagtagaaaacaattattacagttaatttcattactgcaaaccacatataaatttgtcgattttactacataacatagattatcatagattcttgaatttttagcaaaataactgttattttcattatatttttacaaaaaaggttcgttttatattttatgcatcttactgtaacagaatcattaagatatgctattcggaatttactttttcaaaatttctataatgaataaattaccgcgcactgttattaaaatatatacacggtgatatctttccacctctctttcaaatttaaccatatgaaatgacaaatactcactccatattgaagtatttgtgtaaaaagaatcatggtatattgtatatttcgccttattctaatttaatagtgacattaattcttctatcatgacattaaaatcgtcaggaataataaaataacatcctaacctatgaatcagactttaatttctaataaaaaaactctccccaatttctatgggaagagctatatatttaatgtttaaacattacttttatttattatgaaggaattagaatccccaagcacctaaaccttgtgctttgtatgctttaacagctgcgttgatttgttggtcaacagtgtttgttgggccccaacctggcatagtttggaataaacctgaagcacctgatgggttgtaagcatttacttgaccatttgattcacgagcgatgattgcagcccatgtagaagctggaacaccagtacgttgagccatgatttgagctgctgatgaaccagtagcacctgcagtattaccattgcttaatctcactgaacttgaagtagttgaagtgctgtagttatggtaagttggagctgaaacagcttcaacgtttgagttacttgattgtgcatagtagcttactgattgtacatttgaaccttggttgtatgaagtagtgtagtctgcacctgcaacgtttgagaaaccagcagtttgaccattagctgcttcatagctccatgaccatgtagtaccatttgaagtaaagttatattggaaaccatcttttacaaagtggatgtcatatgcaccatctttgattggagctgcatttaattgatcttgatgattatgcgctaagtcaactaagtgtgcttgatcaacgtttacttcagcagcgtgtgcttgatgtcctgtacctgctgcgtaacctgttacacctaatgccactgctaatgatgatgccataattgtctttttcatagtaaaaaatcctccagtaataattgtaagtttatgtttttagtaattatattttgaatttgaatgtcgtagtgcaagtttaaattgtcttttatttctttcaacggtactcactatatcataaaaaagtagcaagtaaattacactttctttacaaaacattacaatatcaggtgttatttgtaatgttgaaatatggttgttttatactgtaatgtgaaatatgtttcttttagaatctaatcaatccttgaaataagcataaatgcataagttttttactatatttagctcaactattacagctttcgtaatattacagattgtatttttgttacacgactgtaacattaccgtcatcaaatataacttaaattgattaattaaacacaattaaaaagcaatcaatacatagattccctcacatgtattgattgctattattgttatatattcaaagttttaaaacacatatcttttgtgtattgacttatcttttataagcacaaataaactgcagctcaattatattgctaaactttattctcgcaattcacaataacattaaataatttttggtctaatattttcaaaaaacatattgtccttatcccatgaatttaaaaatatcattagtatataaacgaaacactttacgataaatgatatctgcaagccaagctgttacaaatggtacaacaaagaacgctactacaattagtaagacactcaaccaagcagaatcaacctccataaatttaaatgcattaatcggtcctaccattcctataaaaccaaatccagctgactctttcgttccatgaatacctactaatgctgataccaagcctgatacaatggctgtcgtcaatattggtaacataagaattggatatttcaccatattaggtatcatcattttaacgcctccaaagaagacggataacggcacccctaaacgatttactttacttgtaccaattatcaatactgcttcagtcgcggaaataccaattgacgctgatccagctgctaaacctgtaatacctatcgcaaaggcaatggccacagttgatagtggcgaaataataataagactaaataccattgaaatcaaaatactcatgacaattggttgtaattctgtaaaaccattaaccatattaccgatggctgttgtaatcattttcgtatacggcaatattaaaataccaattgcacctgaaataccgccaacaactgttgggaatacaatcaaagccatactacctacacgatgttgaataagtaaaatgaacaacactgcaatcgctgctgtaatcattgtattaattaaatcaccaatacccgtaatcatccaagcaccatttttaaactgcgctgcaccgcttcctacatatgctgcacttgccacaacagcaattgctaatggcgataggtcaaatttcatggcaaccaatgcaccaatcaaagcaggtactgtaaattgaattgcaacgacaacgcctaataacgttttaaaaatcggatgataatccataaagtatttaaaaatttctccaagtatcgcattaggaactaaacccgcaacaatacctatggcgacacctgataaaactctaaatataaaatctttgggtgtaattgttttaattgatgtcataatatcatccttccatttatgtatatacatctttatgcaaataataaagagccttaagttataagctgccactagcttaaattctaagatgtgcatgccgatgttgttatatttaggctagcagtatcatctataactcaagactatgaaaaatagtatatcacaaaattctgaattttcagataaagaaattggcaatttttcaatcatattgttacaatacactttttattttatcttcatttttaaaatccattaatataatagaagaaagacattcaaatgcttaccaaaaagatacattatttgttaggagcgtatcagcacttacatatcatcaacacaattgacaacataatagaatatactgataataagtgttaaaacaacagatgttaggtagtgaacaaatgacggaaagtaaatccatagatccaagaatcgttagaaccaaacaattgcttgtcgatgcttttcttaaaatttctagagaaaagaaattgtctcaaattacagttaaagatatcactgatattgctacgttaaatcgtgcaacattttacgctcatttcactgataaagaagacctcctagactacacattgtctgtaaccattttaaaagacttgaatgataacttgagcatttctaatgtcattaatgaaaaggtactgcgtaatattttcatttcaattgcgagttatatcaaagatgctgcaaagtcttgcgaattaaatagtgaagcattttgcaacaaagcacatcaacgtattaataatgaattagaagatatttttgcgattatgttagaaaacagctacccagagcatcaacgagatatcattgtaaatagtgggagttttttagcagctggtatatcaggcttagcattacattggtttaacacgagtcaagaaacagccgatgtgtttatcgatcgcaaccttccatttttaattcatcatatagcacatttttaataaaacttggtatttagtcatgcatcttgaaatcactatgtgacttaggttcatacttgtacacacaataaaatttaacgtattacgattgattagccgtgtctaggacataaatcaacgtcctatactctacaaagccatattggcagtcgttaactgaatgaaaataagcttgtcattaaaacatatagattttagtgacaagcatttttgtttttgcgtacttaaacaacacttcaggcaatatgttgtttaggcaacaaatgatatgtccgtgtttattggcaaacgtacgacatagtagtatagtatgtctaaacaacacatgtcgcatagttgatacgcgttgtttaaatactaagataggagggattggcgtgagcgagacagatgaacctcaagggtttgaacacacgcataacagattaaatattaatcagaatagtcagagtctaatgacattcattacaagtaaattgaagtcgaagttgaagcagcacataataattgctcgtggtaataagcgaatcgactatcgactgtcgtataacttttacactacgtattatgataatgtagaaatcaagaaaatcgactgtgaatatacctatgcgatggccattgcaattttaataagacacacgatgtcattcgacaatgctcatttctttgctcagttacgtcatcctgtcttataaaacaacattgcagacatgtatatcaaacggcacttcaataacatcactttgccgtcgtactactattaaaatcgtgtctcaaaccccttattttaattccaaaaatctgctggtcaaaagacccagaaactaaaaacattactgaatgtgttgataaattacctgatagaaataatctcaaaatatatcaacacttgattctaaggaggatatgacaatatgaaaattttagatagaattaatgaacttgcaaataaagaaaaagtacaaccacttactgtagctgaaaaacaagaacaacatgcattgcgccaagactacttaagcatgatccggggacaagtattaacaacattttccacaataaaagtggttgatccaatcggtcaggatgtcacaccagataaagtttatgatcttcgccaacaatacggttatattcaaaattaatatttgctcacgaggtattgcacttaaggtgccaactgacctcataaacaaagcccatactgattgaagacactaatgtgtcgcaccatgtctcttacgacatgcgcacattacgcttcatctctgtatgggctttttatttattcttttgagaatttcattttagcagactaaaaaattaaaatggtgtccatcaagatctttgaacattgcaccataaaacccttggcttactgttggttcttgaacgactgtgccacccgcttctttcactttattcaccaactggtcaacttcttcatttgtattcacacctaaagaaatcatcacttcatttggttcagtgttaaggctttgctgacttacattttgaaaatgcttgttttctattaaaattacggttgtttgacctatttgaatgcctaccattttatctaacatttgtgggtttctatttattttaaatcctaacgctttataaaactgtgcgctcttttctaaatcttgcacatgcaaattaaaccacattgattgaatcatgattgcaccccattcattacttattatagtcttggactttaagccaatcacttaatgataatcttgttggatttatttcagccattaattcaaagtctacttcataacctttttcttccaaccattgcttttctgcaacaccactaacaaattctccttctataacagtcgatttacctgtcacttcactaaaaattgttgctgcttcacttaatgtaacttcatcggaaccaatctctattgattgatgcgtaaagctttgtagatgttcaaaaacatacgatgcaattttagctatatcaatagaagaaatcattgtgaattttatattcggattaataaattctggtaatgtaatacgttcatcttcgactttagcaatacgtaaaaaattatccataaagaatgatggtttgataactgttgcatttatattagattccattaatctattttctatttttgctagtacttcaaagtgtgggcctgttcgatttcgattaacccctcccgcagtgctatacacaatatgttgaatattttcttgctcagctatttcaattatcttcataccttgtcttaattcttcgctaacatcatctttaacgattggctgaatactgtataaaccatacttccctttcatcgctgattgcaaactaacactatcactcagatcaccttcaacgattgataaatgcggatgtcctatgtctgaaagtttacgattattcttatttctagttaatgcacttacataccatccatcctctaacaactgttttacaactgcattaccttgcttccctgttgcgcctattactaaaatatctttcattttagatccactccccttttatcttaaaaaccaatagtcctctttttcaccttttaaatacgtatatggttctggtgtttgtccattttccttaatattgtcatttattacatctctgacatcccatactaaatgaataaatcgttgtaattgatgactaaaaatgcctagtggcgctttcatagctaatgctttttccacatcttctgtagtaacattcagttttcctgcaatcatttgaaccgataaggtagattcttcaaaatgtgcttgcaattcttcagctgtaatacgtctttgctctttatttaaagacatacgcaacactcttttcttttatgatatttaatagttattgcaaattcattgctaactttcttaacacgttttataataaacggagagttatccgtttgtcaattttagagaactataagtaggtggaatcatgcgaaaagatgcaaaagagaataggcaacgaattgaagaaatagcgcacaaactttttgatgaagaaggcgttgaaaacattagtatgaatcgtattgctaaagaactaggtatcggtatggggacattgtatcgacattttaaagataaaagcgatttatgctactacgtcatacaaagagaccttgatatttttatcactcattttaagcaaattaaagatgactatcattctaattatgaggttatgcaagtgtcgttagattatcttttacaatttaaaatcgaccataaggcactactgcaatgtattgaagcaggcaacaataaattacgtttttaccaaagcgcattttatcaagaattattttatttttattatgacttgtttaaaagcgatgacgacatttacacgaagttcaaaacagatatgctgttgcaagcattatcaacacgtgtatttgatttccaaatagaacatcgcaatatttcaattgaagcgtatagaaattatttattaaacatttatttagatgaggtggaacgtaatgactaaaattgtgttaatcacaggtggtaataaaggattaggctatgcaagtgcggaggcacttaaagcattgggctacaaagtgtatataggttctcgtaatgacgtaagaggacaacaagcatctcaaaaattaggtgttcattatgtacagttagatgttacaagtgactactctgtcaaaaatgcttataacatgattgctgaaaaagaaggtcgtcttgatatcctcattaacaatgcaggtatatctggtcaattttcaacaccttctaaattgacacctcgtgacgttgaagaagtatatcaaacgaatgtatttggtatcgttcgaatgatgaacacattcgtccctctcttagaaaaatctgaacaacctgttgtcgtcaacgtatcaagtggtttaggttcatttggaatggttacaaaccccgaaacagctgaatctaaagtgaattcattagcttattgttcgtctaaatcggcagtaacaatgctaacattacaatacgctaaaggattaccaaatatgcaaatcaatgctgctgatccaggtgctacaaacactgatttagttggtgattttagtaataattcaaaacatgtttctgaagggatcaagccaatcattcaattagcaaccattgatgcagatggcccgacaggtacatttattaatgggaatggtgaaatgccttggtaatccaaatttatgttacaaatattgaatttagaggtaaataaaaaatgcttctgcaatagatgcaatatacatgcaaaacaatatggaggcgaatcaaatgaaaagtattacgtttgaagaacattatgtcattgaagatattcaaaaagaaacgatgaatgcgatatcggcagatcctaaaggtgtgccgatgaaagtaatgttagaaggccttgaaaaaaagacaggttttacaaatgccgacgaattatcacatcatgatgaacgtatccaatttatgaataatcaagacgttcaaattcaagtcttatcttatggaaatgggtctccttcaaatttagttggtcagaaagccattgaattatgtcaaaaagcaaatgatcaattggcaaactatattgcacaatatcccaatcgctttgtaggctttgcaactttacctatcaatgagcctgaagccgcagcgcgagaattcgaacgttgcatcaatgatttaggattcaaaggtgcgctcattatgggacgtgcacaagatggttttcttgatcaagacaaatatgacattattttcaaaacagctgaaaatttaggcgtaccgatttatctacatcccgcgccagttaacagtgacatttatcaatcatactataaaggaaattatcctgaagtaaccgcggcaacatttgcttgttttggttatggttggcacattgatgttggtattcatgcaatacatctagtattatccggcatttttgatcgttatccaaagttaaatatgattattggacattggggtgagtttatcccattcttcttagaacgtatggatgaagctttattcgctgaacatttgaaccaccctgtaagctattactttaaaaataatttttatatcacaccgagtggtatgttaacgaagccacagtttgatttagtcaagaaagaagcaggtattgatagaattctttatgctgctgattatccatatattgagcctgaaaaattaggtgtatttttagacgaactgggtttaacagatgaagaaaaagagaaaataagttatacaaatggtgctaaattattaggtttatcatctaacaattaacaaatggaggtcattgaatatggaaactttagaattacaaggcgctaaattacgctaccaccaagtcggacaaggacccgtgctcatctttattcctggtgcaaacggtaccggagacatttttctacctcttgcagaacagttaaaagaccattttactgttgtagccgttgatcgtcgtgattatggagaaagcgagttagctgaaccactccctgattccgcttctaaccctgacagtgattatcgtgtcaaacgcgacgcacaggacattgccgaacttgcaaagtcattaagtgatgaacctgtctatatattaggttcaagttcaggttcaatcgttgcgatgcatgtgttaaaagattaccctgaagtcgttaaaaagattgcatttcatgaaccaccaattaatacatttttaccagacagtacttattggaaagataaaaatgatgacattgtgcatcaaattttaacagaaggcttagaaaaaggtatgaaaacatttggtgaaacattaaatatcgcaccaattgatgcaaaaatgatgtctcaacctgctgatactgaagaaggacgtatagaacagtacaaacgtacgatgttctggtcaaaatttgaaattagacaatatacgcattcagatattactttggatgatttcacaaaatacagcgataaaatcaccttactaaatgggacagattctagaggctccttcccacaagatgttaacttttatataaataaagaaactggcatacctattgtagatattccaggcggtcacttaggttatattcaaaaacctgaaggctttgctgatgtattattaaatatgtggggttaattgatcgttctctaataaaacagcttggacagttttcaaattatatttgatggctgaccaagcttatttttatttacgcttaaacgttcaaatcaactcgttattatacatgaaggcatgttaaccattctcttccactgaaaacactactgttccaaacattgatagtcttcttttgaaataccctttccgataagcaccaaatattctggcactttttttgaaaatgctacaggtgttaattcatattgtccttgtgtaaattgaatgagatacgtatgtgcggtgtcttcaaatgtcataaaccctttcaacctataaatatgagtcggaaggcatgctaaacgttttataaactgtgctttagtacatttggctggtgattgcacaaattgatgatttattgttttgtgtaatgattcatgtttattgtcagaagttgctgtcatttggctaactgatattggcaaagtgacgctgccatgcataccaacttgtatatcggcctctgggttaataacttctaaatctttcaatagtttgctcgtcgtttcaacatctgctgaatctattttattaacaaataagacagaacaatatgctaattgctcataaaataagccttggatgtcttttggaaatgattttatgtgtttatacatgcttgcatctacaacaccaatcatatgtgtaattgttgtaaacggagctaaaatgggcgttaaacaagcatctaagacagagactggttctgcaatcccactacattcaataaatacaatgtctggttgctcttttaaatataattgatgtaactgttctgatacatctgctttcattgcacaacagatacacccctctgtcagttcacttaaaggtatgtcttcagatactaaggcaccatcaacactcattttgccaaattcattcatgataactgccggtttcatcgactcctttaatgattcagcgagcaaatgatttaagacagtcgttttaccgccacctaaaaacccacctataataactattttcatctgcgactctcctcttatacttcatatgaatagcatattccaagatagctttcctattgactgacatgactctatattcagttatagttcatttcttttttaaataatcagcattactattttaacaatgatgcctacaccaataactaaagacaatgatgtcaccatttgctttccaattaattttagtgctgactgaccacctaaatgtttcaaaagcatcgtcattgtgaccgagcacgctgtaaatgttgaactaaaaaacacaagtagtagtaactgtgttgctgtcattccttgtaataaggcgccttgatgcaaattaaacaagagcatgccgtcttttcgaatcattgaaaataaaatccctggtgacaattctgacgagatgcctaataacgataatataggtgtaaatatttgtgataaaacattcaaaattggcgttagtgataaaatactaacaataagacagattgtgataaaaataggtagcgcttgaacgataaacatttgtatattttgccacatttgtagcaacatttgacgtatatttggcatatgtaattgcctatcataaggtagcggaacgctaagttgttgatcattctttttcaaccatatcctattatgtaagatgccacctaaaagtactaatattaagtacggcataaatagccatgactttccagctacactaaaaatagataatgtcgcacctatttgataactacaagaactaccaaagcttattaaactcatacactgtgtcttcgtgcaggtatggcattggtgtgctgcttgtgaaatagctgctgcattacatccaaatccttctaatagtggcacgatatcattaccttgtaatcctatccgtaacattgaaggttcaattgcccatatcatccatgatttaaatcctgtttgatcaattacagcagttgataagctaatcaatattacgaccggcaatgcccatacgagcgaatatgttccaagtgatagcacaccataatcaccaaataatatatgctgtaatatatcgtgattgagcaatgttgtttgagttaaatattctatccatgctgatacatactgattttgaaaccaatctgaaaattgataagcgataccgattggcaatgcaaacattaaaaatatcaacaaccaggctaaaaatgtcgcacttattttaggtcttaaatgtcgtcgttcatgttgaaatagtgtcaattgttctatcacatgttcgctcgctataggcgaagaaactacactttctgccaatgaaatatctaatttctgttttatgattaataatcttaatttcgctttttctgttgcggtaagtttatccgcatggctaataaccaaataatgaggttcattaggtatgggcgtataatgccccgttctcatatcatatttcacttctaacatgtgcatgacacttcacaacatgaataatcatctaaatacatttgatttttttggtaattttcaatgacttcttgtttagctggtaagccttcccgctgtgttaaaagatgtgcaagtactgcaaatcgcgctctgaatttatagatatagcataatttggcattatcattttcaactgttgcaccaatcataaaaatattcggataacgtgtcgattcatcatgtgttgttaatttaatatcttgatttgttgtcgcaaataattgttgaacgattggattttttgttgcatcaaagccagttgctactattggttcatgaggcgtaagcacactttgtccgctatcaaaactgatatgatactgtccatcgttaaaatcaatatctttaactgtataatgcacattcatttcaatgcgagctccttgcttaatgacattacctagtcgctgacgtgtataaggtgacaatctaacactaggatcagcatccggatcatttaaaccggttgtgctagtataaagtgcgatgtcagagccattttttgcaagttgatatgcagcatcaaagccactttcattacctccgataaccacatattgccccttattaaagttatcaaagtcttcaatttcactataatgaataccatatttaaatggctttttagggaaattataatcacctgttgcgacaaagatataatccgcgtgatatgtctctgttgtcgttgcaatcgtataatatgcatcatctacagatatatttgtgacaactgtattttcaaagatattcagctcgtaatggttggcaaccacttgtaaatattcagcatatgtttctccggaaatatgttcttcattaaaagtaaatgctggtgaagtatccatggaaattgcattcatatcaggcatgccaaatccattagacgtaaatgatggcgtaatcgtacgggtcgatttcggccaatgtttaaatgaatgtcctactgttcctttttctaaaataatgacatctgttataccgaaatcttttaaggtaatggccatacctatacctgcagcaccggcaccgataatagccactttatgatgttgcatattaacactccctcaatgatctatttcaagttattgtttttgattataaatcgtaataattacgatttataaagtatagacctatccttgagaaatttcaatattaaaagaaaaacttccgctattgtagagaattcatctacatttcggaagttggtatgtgtcttttttattggcagtgtgtcaatagaaaaatgagaatttcttaaatttttttaataaatattactaaaagagtacagaagaagaaaaagaagcattttactagtaatatctgtcaaaaaccacagatttaaatagtatgcttctttttagattatgcattttatatacaaaatttattcgtcctgtccttccgcgctcattgtaaaccattcgcttagattaacctatattaattgacgggttcgtgcctcacacagtcatttaatataggttcacaattttgtgtgcttacatggtactttagcatttcctcactcgatttatagtcaaatatcattcgaggccgtgcattaatttgtttaacagcttcatctaatgacttttgtgttatatttgcaaaatccgtacctttaggataatactgtcttaaaagtccatttgcattttcaatagaaccacgttgatatggacaacccaaatcactaaaataaatactacaattcaattcatcttctatttgttcaaatagagcaaactccttacctctatccatagttatacttttgggtaataatggtttcataatatttataatctcattacaaactacattggatttacgtgtatttaatctactagcatataaatatcttgtctttctttcaataatagttaacaagcaatatgttgatggtctaacactccaaacagtatcaatttcataatgtccaaattcttcacgattattaatactttttgagccgatactttataacacgagtgttactttacttgatatatgagaatgattttacctagtaaatgagaaaagcaatgtcctatattaaagtacattgctttttctattaacgaatacctatgactaaactatctctagctgtttctacaacttctgtactgattttatctaagccatttatatccataattctatctatctgcgcaaataaacgatgaatcagcctaaaattcccttttgtaattttaataatcgtcgttattgcctcataatcagtaaaatcttcgagttttagatcaaatcctaaatcttgccacttatattctaatatatgatgcgtctcgtctttacttagattatcaaattcatgtgcaaaacctatacgcgaatatagttgaggataacgagatagttttttctctatacctggcataccaataaatatcattgctaaattatgttcatcataaatagctcttaattgctctaaatgttgcactttaaggcgatcaatctcatctactataattaaatcaatatatttaaacatatcactataatgtttactatgatcatgaccatacttatttacgatgtgtaatttttgacccaaatcaatacttgcactaatactatatagatcattacttaatcttgtttgtttttcagccggtgcagtataaaatatcttattcaccgataatatatcatcagtcgttttactagctagatcttcccaccctctatgattaacttgcttttcaatagtattccaatttgtgtaatacctagaagataaagtttttccgacaccaggttgaccatagcagatcccaatatattgatatttgatacaagcatcgcaaaattcagcaaatcgtttatactctttcgtttcaatgaaattctgatttttagtcattacgatacctctttaattttttgacgtttttggtcgtttcttgaggtgagtaaccataacttttttcttccttaattaaatcagtggtgcttggactagcaatgttttgttttaagtgttttcttctctgactacgtgcgtgttgtatctcttttatatcaattgaataatcagctaaatcaggggatattgctgtacaaagaaattcatctctataaaaaacgcgtatttcagccatatcattgggattgtaacgaattaatacatactcacctacataagcagttaggtttgtattactgtatctaaagccttgaaaatgaataccatctgaatgaatttttctagatttaggtatttctaataataataaatcaagttgttctaaactgcttggcatattaggaaaaaaatgattactgttccaccgattgataggagtgctctggatagcactgtgctctttttgattataatcttcaattaaaaagtatcgtaatttttcttcgaaattttgaaaatctattaaatcgctagaagtatcattattgtttatatatccaggaagttgttctaagaaagtttggttaactgtctgaaaaaaccgttctattttcccgcgaccacgagggacaccaacttttgaaaacatcaagttaattttcaaatcaatagcgacttgttccatgtggtgcgaggtaaagtcactcccgtgatctgtgtagaatttttcgggtataccacatactggccaattggtattattcttattccatattgcttggtgtagtgttaatgctgtgttttgagcattaggagcatcaaaacttataaagtagcctgcaattgcacgactatagtcatccataataatggttagccatggtctattgatattacctttttgatctaatatataaatatctagcaaagtatggtcggcttgccatatttcattgggtcttgaggattctcttatttgtattaaatcgtacttattttgatagtatttttcaccttggtgagagaaatcaataacagacttaggcattgctttaataatactataaacttgtttataacttggtttataaaaattattctctatacaataattagcgattttcctatgaatcgtagcaatactatttcttttattcttgagtgcaaggcgtttaatctcgtctattatgttttgttttaatttatgctcacctttatcaactcttgtattatgaattagaccagtaagaccttgttccttatataatttattccacctataaagtgtacttaacgcaatacctttgcttttagaaatgcttgataaagattgcttgcccaagataaaaggttttataatattgtacttttgagtagcttctttacgtttggcttcagaaaaattagttagatacttctccttgtttttcatcttccttttcctccaatttattgaggtaacgataaatcgttgtacgtgaaacttgccactgctctgcaattgtcttaattggcgtgccattatcataaagtgtcttaagtaagtttaaatctttttgatttaatttttcgggtctacctccatagcgtcctctagcacgtgctgcaattcggccagctgaagaacgttctaaaattaaatttcgttcaaattctgcaaacgctgcgaataaatgaaataataattgtcctgtagaacttgatttatccatcgttatattttcttctaaactatggaaacttacacctcgttcgttaagctcattaactaatgtgattaaatcctccatattacgtcctagtctgtcgagtctccaaacaacaatcgtatctcctgatctcgcaaattcaattgctttatctaatccaggtcttttactttttgaaccactaatatggtcgctaaatatcttttcacaaccatatgcgtttaatcggtcctcctgtaaattcagattttgtaatccagttgaaactcttgcataacctattttcaaaatacaaacctcctatatacatatacagtgtaccataacttaatttcaaggtcttttgtgaacatagattttttgttgggtttttgaacacgaaaatatatgtattactcacttatttcggcataaaaagagagtgtacagaaaatggttattttctgtacactctcatctttaataatatattttaaatgttattaacaaaactaatttaataagagtcaagcatagtttacatatgtattatgtttgaaacatatctctaattactttttactaatatcatttaaaatgtctcgcaattcttcaatttctttgttatttaattcttcatttttcgcaaaattcagcactaaacttttcatgtcccctccatacagtttattaagaaaggttttagcagttttcattttaatatcgtcttctttaatatttgatgagtaaaaataaatattctctgatttgtatcgttttataatctcttttttatatagtcttgtgattaatgttctaatcgttttatcgctaacttctttatatttttgaatttcaactacaatttcattagctgatactgattttttaccccatattatattcataacatcccattcagccatagatatttcaacttgcttattggccatttaaaacacccatttcttttaatattttttcactgattaattcagcatttttcccagatggctttccatctgataaatgtgtagcaaaataatacttatcatgatttgtaattacgtaacctacaaaccacccattattatacttcccgtttactatacctgtacctgttttcccatacagttcatacttttcatttttcttaatcaataatgaagaagataattgattctttgcttttttactaaaatggttattttgttccatcatatttttaaaaactattacttgttcaagattagatattttcaaactatcttccatccaatagcttttataacttcccaaatttttattaccataatttaattgcttgagttgagtcgcagtatagttctttggtatttgatcgctaatacgttcgaagtaccaattaactgaattttgcattgctgtatttaaatcttgttccttattccaagcatcaaaagggtaatgcttatgattccatgacatacgtgaattttcatcatttataatatgtcggtcaagtccaaacatagctaaataaattttataagttgaattaggagaatacctttttctactttctttttcgttataaatatagtatttgtctttcttcatgctgtacatgacgaaagatccactatttgaaccaaaaattttacttttatctaaaatttggtaatcgttgtgtaagggctttttataattataatcagttatggattgccccatcaaaaactggctttgaattaccatgagcaaaaaagtaaaaatacaaataaaaattagaattaatttggactgttttttcagattggcttcttttatattaattaatcttcttttgagtaatgactttttaccattaaatgaatggcttaatatatttttattaaaaaatggaacatttaatacggagtccataatagattccgcataagttttaaattcatttttgttaatattattaaggacaaatctatcggcttctacttcattgtcatgaattatctttctttttacaatatgtactaatggattgtaactcataataatagagaagatattaaagataattaaatgtaaagtatctctatttttagcatgagcatattcatgcaatattatatattttagtcttttgtcaattacacttttaaaatatgaactaggaatcaaaataatatatttcccataccaaaaagttattggagattgaatagtctctgcttttcgaatcacaatattttttttatattgatggttgaaaagtatcgtatctattttatttttttcattttcgtttagataaagtgactgtttctttaaatatttaagatataataaggctttcaaaaatttaaaacttaaaataataactaaaactatccaaataactgtgcagatattatcaattgaatcccaattaaacttatggatatctgttgcgaactcttgaataggtttggtggtatttatgttatggttcaagtcgtgtgacttactttcaactgtgggcgcttgattattcacattattaaatttaaaaagagagaatttaataggaatgaaaggaattaatcctgcaagaagagttagataccaaactttataatttaacatataattaaaatagcgttttaatatgtacctaaaaaataataacaatagaaatataaaacaaaagcttactatgctcattattaataacttagccatttcaacaccttctttcaaatatttataataaactattgacaccgatattacaattgtaatattattgatttataaaaattacaactgtaatatcggagggtttattttgaaaaagttaatatttttaattgtaattgctttagttttaagtgcatgtaattcaaacagttcacatgccaaagagttaaatgatttagaaaaaaaatataatgctcatattggtgtttatgctttagatactaaaagtggtaaggaagtaaaatttaattcagataagagatttgcctatgcttcaacttcaaaagcgataaatagtgctattttgttagaacaagtaccttataataagttaaataaaaaagtacatattaacaaagatgatatagttgcttattctcctattttagaaaaatatgtaggaaaagatatcactttaaaagcacttattgaggcttcaatgacatatagtgataatacagcaaacaataaaattataaaagaaatcggtggaatcaaaaaagttaaacaacgtctaaaagaactaggagataaagtaacaaatccagttagatatgagatagaattaaattactattcaccaaagagcaaaaaagatacttcaacacctgctgctttcggtaagactttaaataaacttatcgcaaatggaaaattaagcaaagaaaacaaaaaattcttacttgatttaatgttaaataataaaagcggagatactttaattaaagacggtgttccaaaagactataaggttgctgataaaagtggtcaagcaataacatatgcttctagaaatgatgttgcttttgtttatcctaagggccaatctgaacctattgttttagtcatttttacgaataaagacaataaaagtgataagccaaatgataagttgataagtgaaaccgccaagagtgtaatgaaggaattttaatattctaaatgcataataaatactgataacatcttatattttgtattatattttgtattatattttgtattatcgttgacatgtataattttgatatcaaaaactgattttccctctattattttcgagatttattttcttaattctctttaacaaactagaaatattgtatatacaaaaaattataaataatagatgaatagtttaattataggtgttcatcaatcgaaaaagcaacgtatcttatttaaagtgcgttgcttttttctcatttataaggttaaataattctcatatatcaagcaaagtgacacacgagaccctacgtctaatttgccacgcttttcagaagacttattatatttcttgcctgcttgtctcatatcacgcttaacatcaacttttaccaatccattgcgaatatatctatatatagtaggataacttatataataccctgtatctttttcaatttgacttgctatctgtctaggagaccattttaatgaaagtttttcttcaatatatgcttttgtttcatcattcaaacgtctacgtttagcaacttgttcatctgaaatactacgcgattttatagcatcttcctcagctaataaaggattataaacaccatcaacagaacgcttatttacttctctataaagaactgcatcatcacgacctaaaatcttagaaatctgaatgatgtttaaaccatcatttaaatactttgcgatagctagacgtgttttatagtctaattctttacgtttttttctttttttcatgtatatcctcctttacttttaaaaaggttatttataaaataagttataagaggatatatgttcatcaactcccgataccaccgctaaagcgtatagggagttgattctttattttttcatattattttcttcataaactggtttattatctttctcaaacttttcagcatcaatattagaatcttcttcatatttatcgctagtctgatttattttatatactcttgaaacttttgtattactatctttaaaaggcatataagtcattataataacctcaccatcattataaatcttataataactttttgaccgctcaacatttttatacttctttgtatttttcacatcttgaatactttctttttctaactttgtaacttcatcaatttctttatcatatttctgaccacatgcagataataatataactaatcctaaaattaatacaaaccatcgcctcatgataaattcactcctttttacgtaaattatatcattgctatcgtcttgaaacaaactaacgtcctagaggttttaaattgaaacgttttaaattatcaatacgccaaccttcagctgtacgaactaaatccaattgtgcagatgtttgacgatgttcaattttatcatctccatctgtttcaatacgttcgtcgaactgaacaaaaactttataactatcttttttagggtcataagtatcaaaataaacatgaatatcattaaccgttatatcatcatataaatcatatttatctttagaatccttaaataatgtatcgtaataatcctttgtaactaaaggctttatttgtggtgcttttgatttaaaagaagaatcttttttcatttcaaacatctgtttaacaaaatttgaagaaacttcacgtatttgtttttcttcatcagaaataactgtttttgattgtctctttactaatttatttaactctccatttttatctcttaatatacgttgttcttcctgcaaatcttcaatttgattttgtttcattttaacttgttgtttaggaatctgataaccaattaaaacagcacaaaataatattactgttacaagagtaaacataataattttttgcttcatttattttcactccttatcatgaataaaactatatccgtcagtcattttcaatgtacgttcattaactttaaaagcaccttcccaattcatttctgttattctaaatgttttaccaccatcacttacaccaataacaacagccacatgaccataatgcccatcatgaccgcctgcaccttgttcagcaataaataatgcaccaggttccggatttttatcaactttataaccctcagccttagccctatcattccatttatgtgcatcatgccaataagttgatacaggtttacccattttttgacgcataccgtatgcataccaagtacattgaccagcagtatataaattaccttttccagggtcatcatttgaccaatgtggcaatttaccattaaactttatagactttcctttaccattactacatgacgttttagcttctgaaccgcctaaatctttcataattttttcaactgttggtatccaacgggcattcatattattagggtcatttgacgcaccaacaggcgcatatttgggacctatttttttaggagtatctaaacctttagaaatataaacatcatacaaatttttagctcccgcattaagaccgtcttcaatagttggatatgttgaatcatgaatcgattttgaacccataacagacaaaggattattttgtcttgtcgcattttctcctttaccccattgtgattcactcgcaataatagccataaaaatattcacaggtactttatttttttctgcaattttctgtatttcttttcctttaccctctaattttccacctttagcattttcattaaacttatcaataccatttgccgaaacattaccgccactaacagtacaaccagcatcatctttatctttatttgaatcaggcgctaacaaaaacattacaattactggaaatgtcaaaaaagccaccacacacaaaatgatgatgactttcgctaatttcaatttaacacctattggcgttttacctattacttttttagcaatatcttttttatttaccatgcttattgatatccttttgctcttttagacggtcttttgactgagaattacgtgtaataggttgattacgatttccagattgtctactttgttgattctgtgtcgcattttgtatttgtcgtttttgaacatcagtatcataagcagtttgaactgacttctgttctttacgatttattgaatgattctcattatttaatggctgattaaccacttgtggcgacctttgtatatcttttcgctgtcttgtttctcgtacttgatgttcttgctgtgatgctttttgtggttgtttagaataattatttgcatttgattcaacagaagcagattttacatcgttaccattcattgactcttgttgttctctgcgcttattaccatttttttgattatctttatttataaataaaggcattggtttatcctgttgtcttcttcttaaatcattatcattttgaagtggtggggcgggttcatctctttgattttctcgtttagctttcttattttgcgcttgttcatgacgaatcttattaaaacgttcttgtgttcgattcatcacaccagcaccaattgcactaggagaaaaactaatattaccacgacttacaaaattgataatttgagcccgttttttatacattacaaacaatattacaattataaatattgaatttaaaaaataagcattttgactatccggttcaataaaactatttgcaagcttgatacacaaaccaactatcacaaataagaatgtcatacaagcacttaaaataatatagcctaacgtttttgcaaacgcagagaaaacagataattcaaatcctggtataaaactcactatccaactgaatactaaaaataagaataaaaataaagcaaatgtagaaaaaatcaacttcgcaaaacttattgataaaaatactatcgacataaaaagtgtaataataaaaccaatcactgaaatagccaacttttgaaatacataaccttgcgtcatatatttattatttttcttttcaacctcatctttaacaatatcatctaattctttttctgattttttatcataatcaagttttaaaatgttatcaatacggtctttaccttttgcttttatctctttttcgtcgacagttccataattcattactaaatatgttctatatatcgtcatatcaaataattgattacgtatatgattcatacctgaattctcatgaatataatcaatattaccatcaatagaagatgtactattcataattatattatttaagtccttaccaatattgtttgtaccacgtataatattacctgcattcgcaagtataccaacaccaaaaccaattaaacacataattaaaaacgctcgttttaatgcttctcttgcattaccttgtacactaaaaataataaatgcgttaaaacaaacaataataaataatgttaatgctaaattactcaataacttttgatatatatcgccaacaaaatcgccgattttatccgcaaaatcattaataacatctaattgaaataaattttcaatcgcataatctgtaacacctgctaaaatcttagtcatagaaaagaaaaaatctgacacattattaatttgacgtgaaatttcttcttgaccaaacggattccagtcgcctttttcactatatattgaacgataatgtgataaatcatacttttcaatttttggcttaactgcatgtgagggctctccaactggattagaaacagcgtaagcactcacagatgttaaaagcagaataggcaaaattaaaaagcataaaagatacacacttttatgcttcatcaaatcactccttatttaatatttgtttcacatcttccacaaaatcatattgttccattaaaggtgcatcaaataaaattggttcattatattgtccaagtatagaaatataacctcggccgatatcactatcatgaatcgtttgaaattctttatcagtttgaccaaaggtcatacgataaccatcatttgacaaattacctaaagacacacgtaaccctaattggtcacgcacattacctttaatcacatctgcatctggtctttgtgctgttaaaaacataaatacaccagcttgacgacctttcataataatattaattaaataatcattcatttcttgtaattcttttttatctaaagttgaagtaaaagccgttacctcatcaaaaataatgaaataggggcgcatatcaaaattacggaaatcattcccgattttataatccgaactatcattcattaatctaaaacgctcttccatttcattattagcttctctcaattgttttaatatttgacctttagtatctgcaactttatcatcaccaataacgcgcttcataaagctcaaatctgaaacttttgggtctaataaacgtacttctgaatgtctacggaataactcacgaatcacataaaataaaaaatatgttttaccacctccggttatacctgtaaccaatccatgaggtgctttcacaaaatcccaagtaatttgatgcgtaatagcaatttttgtatcataaaaaattgtatttgattcttgttcgccattcataacaatacgctttttatatttaagtggcataaattcatatctcaaataacgaccaatatgctttttttctactaattcagaattaaacattggttcaataatcgtctctaactctaaataattatcttgaaacctcgaaccgtctttcttaatatgaataacaaaagattttttaccacgcttataaaacattgttggataataatcatattcagtttgtttataatcaatagggatatactcagttgttttcttgattactgtacgattatgaaaaccttgtgtttcaatcatttcagccaaatcttttgttttaaaacgtattaaaaactgagcaataagcttacatatcacaaatataattgctgtaccaattaataaatacaataaatgcggtttaaaatatgcaaacaacgtcaatatatccaattttttattaactgatttataatcaataaacaaaatgtatatacgatataccaaaaaaataaatgctaacacacctgcaaacataaaatcaatatacttctgataaggctgtatacgtacgcctttaaataaagcaatttcattcattgccatcaaatccactcctttaaaataaacagcacatacaattttgtatgtgctaaaaattacatcgcaaatttttcttcagctttagagcttgcagaatcttcttgtgttctaaatgcttcagtcatttcctcaaatggacaatgtacaaccatttttccaacacgtccataaaaatcactaaatatacattgacctttcttcaaatctttcaacatttccatattttcaggagattcttttgaatattctaagcctaaagattttaaaatatcctcacgttcatctttttcatcaaatgcaaaatgacaaccaaagttaccaccatcatcatctgctttatcttttaccgattgtgtgataaatacaagtgaattattctcagaacgtcccgttctttttatacgcttaccaacttttttaccttgtcttgaagcagtaaaagcccaaccctcatcaataaatatagtcgtttgaacatctctacgagaaccgaatttctctaaaaacttaccaattaataacattaatgtaatcccatttttctcacttgttgaataacttgatgtatcatcatctgctttaggcatatctaaacctttaacctgtaaaatagttgctttttcttgaatatttaaagctggattcgtaccatcactaaaaacaagttttaaaatattgttttgcgttttttcaaataataaatcgcctgcattttttacatgctcatcttcattattctgtaatttttcaattacatttaatgaaccaacttttttaccattttcacgttcttcaaccgtatcagaaatagcttgataaattgccgtttcaatatgatgataattttcaaaagatttaatttcatcaaacaccgatttcaacatctcattagcttcaataccatctaaaaatacaatagggtctagacaaccataattggttgaatcttcataattcaatgttacatatttaaatgtttttaaatgattaataaataggggatacttttcttgcatttccttactttctgttactctgtcaaaccattctgcaaactcagattttggatcccagtacaacatttgacctttaaaaaatgatgtataaatccataataattttgctaaaaatgatttacctttaccagtttgaccagtaattaaaacatgcggactatcactgacagcccctttaataccttttgcagccaacaataaactaaataaaattatatcccttgaacttgcaacagcttcctcacgtgaaacagaacgaataaatttatcaatacgccctatataaaaacctgtttttgttcccaaactttgagacacaccaaataaattttctgctatacctgttgccgtagttctttgtaaccaatacttattaataaataaatcattaccatgtaaacactgataaaacaattgtaactggtcagctaatggattaactgcatatatttgagtttcctttaatcgtttcatcaaacgctttgctttacgtttacagtctctataatcatcacttttaattacaaacataaatacccactcaataaatacacctgagccagtcacttctcgttccatttgattcaatacaaacaaattatcttgaacatcttccgaagcactatcgccagtatcttgcttttcttttgcttgttgtttatgatttattttcgcacggtcaaattttttcttaactttttcattattaataatttttgcttttacatgacattcaaccggaaaaggcatattttgagctttctcaaataaatgtgtatattccatatctaacggaaaatcatcaacaacaactgttgttgtgtaaaatttttcattatcattttcaacttctaaaacactcaaacgagtagggtcaattactgcattataaatatctgtaatagctcgtcttgaagattcttcctgtacgtcatgtgttgcatttgatataaatggcttccgaataatataagccagctcattctcagttaaacgctcgcctccaatacctagaaaactatcagccaaatctcgttcaaatgttttatacttatctaaaattttatcgtctaaattcacatcaaaaccaaaattcgaaacaatacgctcagccgtatctgataatgtactttttaaaatctctttaagtgtaactgcatcgtcagctaattcacgtattttaacacccataacaaaagaattatgcgtaatcatttgtaattcttgttctaatacgtcaatagtttcttttgaataatattcagctacattaaaagcttcatcatcaaaatctttactaatttctttaaatttatttcgcaaatctaaatcgtggtcatacatttcaaaatgaaaatcttgataacctttaatcgactctaaaaaataacgcatacgcttttttgattcttcttttgcatcataatttgctgttgatatagactcagaacgaacacgataatacacccaaacttcgccagttttcgttaataacaaattatctcttaaacctgcatacggtgcttttaaattcatgtcatccctccaataaaaataaccccaataggggctatttaaatgttatttttttatcatgatattctacttcttcatcataacttaatttaacttttcttaactgcacattaaaaacaaatattacaaaatcccataagaagaaaaataatttctttccatcttgttttaacttaacaatatatttcgttatataataaggtgcaaccgtaaagtaaataaacataagtccaccaatcgacataattacaggctgtaataaataccaaaataacaaaaataatataaaccacacaatcaaaaatgtagcccaaaaatctaaacgaaaacccttattaatacgaaacttatctgtaaattcatacataactatcggttgttcaaaagttcgctttaaattataagcttttttatccaaatggaatcacctcaaccgccaaaaatcattttccaaacacctgcaatcgcattaaatacctgttcaggacctttagaaactaagaataaaaagccaccaacaacaaataatataaccatatgcccatatttaccactagcccattttacaataccaacaaccaatactactaaaccaatacccgtacctacttcattacttatccagtcaccaactccaccaagtgatggacggtcagcacctaaaacaaaaaaattaaataaaccactcataacattaacctccaatagaattagtcatatttttaacgtaatatttaccatctttttttgttatatctaatgtgtaatgttccaaattctccaaaggagaatctttatctttcatcaaaatttcaactttagcaacataatcatcgccttttggatataacctaatttctcttatctgagaaacttctctagttccttctaagccctcagggttatccattaaataggccatatcatcagacttactagaagcatatttattaaagaaatcttcaataaaagcttttgctttcggattgtcttcccgtttattgtctttcaaattatcctcaaccattttagctttattcaattgactatcagggattggcgtaaaataaggatattcaacaacaacatacttattattttcactcttaataggtatatttattaaaatgttttgatttactttacgttgcttttcttctgtttttgtttcatactcatctttatctttttcacttttctttttcttcttaactttaacttctttcttttcagtaatattcacatcataattaacaatatactgtataattgtttgtttatctttacgtttaatattataaaattctttactattcaattttcgttctgtatctgaaattttttcatcaggttttttataatctgatggaaaatattttaacaattctttttctctagattccaattcttttgaatctttcgagatattcatatacgtatcaataaacttatcagcatataactttaatttaggactatactgaactgtattcgcattatcttcatactttttttgaatcatattcgttttattaactgcttctttactgtcattatttgctcttgtagctttaataaaagaagctaataaaagaattaacaaaatagctaataatgagtaaaaacaaattacaatcatcttacgacgatttttaaattttggaattactcggcgttgttctttaggaatatcaaaatgctttccgtttttagaaaatcgtgttaaaatgtacttgcttattattttcataaacgattttctaaaatcctttacgaaatttttaataaaaatcacatcccagttatttttttaacacttatcttttgataagtgctttttttgttttaaagcctccaaataatgattaattctattcgtatgctcatcattaaattgtgaatgcgctaaaattttatctaaaaaatcagtatctgtaagcaacccctcagattgcgccatactttcggcagttaacactgtatctaaagtagtagcaacttgtttacataaccaatcaagattatcctcaatggactttaatgttggtctagtagttaaattcaatttttcagtatctttaataaataacgcccaaggtctatataatggccaccgcttacgatttttatcatttccatctttaggaggagagataaaacgcaaattattatgcaatatagactttacaatttcgcttatattatctgttctactcaacactttcgcacaattaactgcatatgcctttcgcatttgtatttcataacgattccatagcccaatgtcttcgacatcacaatgacgtttaaacgcttgttcataattcttttcataaaaacgacaatataaattgctttgtttagaaccaatataaaaagtagcgcctttacttcttccgtctgacaaattaaaaccgtttattgcgcttccagctctaaaacgtgaaacacactcagctttttcagcctttttaattaataaaggcacttttaaatatgttttataatcatcaattgcaatatcaattcttgtaaaatttgcattaactgataaacatttgtcaaaaaaatcttgccaagttttattcaactgctgtaaatgatgttcaaactctctacaacctgtaccagttaactgtaagtgaatgcccattgattcatcatcacttgaataatacaatttaatgtttgaaaattcataaccgcgattataaaagtaaatgccactatttcgttttttgaacaacgttataggcaaaccgataacgtcctcaattactgctgaaatagggtctatatggaaagtgacctgaacccagtcaacaactgcctccacagcacttttatttgtacgctctacccccctattagtaaggggggtacactggttttttaaagtcatatttatttatgcctcctatcaaatcgcaagcgatttgatacatgaccgttctcgcttttttaacgcgtatttgtcgcaggctccgcccaaatgcttaacgcactccgtgcttgcatttctgcgcctgcatacgctaaaagctacacggtcatgttaaatcactaatactatatgttaaacatcaatatcgccaatataaatacaatcttccaaattcacttgtagcattctgccatgtcctgcttcactcaagctcatacacaatagacaaaggtcagcgtaaattttaggccgaccttttaccgtattttctttaacgtaactatcattaaatttagactgtatttctttagctaaagtcattaatgaaactttatcgccccaatttatacgactagcaacatagtttaaaataggttcactcaaatttgaactatttgtgtagcgatataatctatctgctgtataataatccatttacatcacctaattatttttgtttaagtgcactattagaaccaactactttaatatcttctgcattccagctatatgcgatagttccaaaatcgcctgacatttgaacatacattttaacgtctggttcaactaattcgcattcttgtaaatagtctaattccactttattaggcgttttaacagtgatttgttcgccttgttcttgactcgctaatttatatgcataaacagttttatcagtacgctctccattttcatatttatatttttcatctacacctaaaaagtttaattgtcctaaagtttttttaatatccaatactggtttcataatatatccatcctttacaaaatttttaataaaattaaacgacttctaaagggtcgcacgaataggaataactcccgcaaatccgtaccactgcatttttgataatggagtgtctatgcttctcctgacctatcatatttttaatcaaacctatcggttcatcacctcaaaaaattctaagtcttcaattgaaatatgatacatcttacaaataaatgtattagacacaccatattgttttaaaaatttataatccttataagtaaatcgataatcattcttttttgccatttcacaaacttctaatatacgaaaatatgcaaaattatacattttacaaatttttcttttagaaacaccatgaaatcttaaaattacaaatttaagataatttaattgatttgaaccatcaaaaaaaggtgtaaactcagtcataattatcaattcctttcataagaattaactgttaactagagtttacaccaccattaaatttaaggatgcaacggttagttcaaatgattatgaatgacatttcatggtatcatccagcctcagtacttggagataacattttggcggtgagacagaaatgatatttttacaaaatttatttcggcgtccctccaataaatataaagtatttctttattgtggcgtaacttctccacgttgtatttcactatccaaattttgtttcatattatcaaacaactcttgaaatctaacctcatcttgatcagaataacctttaaaaataactgaatctatattttcttcgttaaaataataaatttcatcttccacaacaccaatcggatatttacatgcagaatagtcaaacatatacttttgattttcaatttctacaattggtcctctattaataatcattaacttttgcgaaccttcttttaaataaataatgcttcctattgtttccatttattttcctcctttgtcaccatctcgatttcgatatttcttcgcatttccaagtcaatcatctcttcttccgctttacgaatgtcatgttgaatttgctgttgctgctcgtataacgcttccgttgaacgtcgtttcgcaaaatgaaattcatcgcggaactgttccatacgactagccatattgctactataataacgctcacctaaatgttgatataattgttctatcgaatgattaagcgcatcgctttcatctatcaatgctttaacctcttgcttttcatcatataagtcatccatttgcttatgtttcgctgtgatcatcttattgattccatcaagtttattcgacatcatttcaccacgttttaatttttaccaatttcattaccaatcattacgtcagtttggtcaaaagcctcaccaactttttgtatattatcgctcgcagttcgtattgcttcagcaacagattgattcttactaatcaaatcatctatcacactatgagcattattatttccacttactgttgtactttcatctttatccggtttcgacacattattacatgtttcaacagcgcttttaatagatgatgatgcactattagtcttaaaaatatcactttgaactgtactcatcatttacacctcttcccatttaaattattttaaaattattagaaactgtatcaatatatgatattcaaacattcaattatacttaaatattgttttgtgattatattcaaaattattgtatcaataaatatgtatcattcctagaattttattgaacaaaaagttagaaaatcacttttattgcaactcaatcttgttttgtattatagaaattaacaatagagattaaaattttattttccaacaataaaaaagcacaaatatttttattgaggcagctgaaggccttctcattataaaattatctgtgcatattattatcttaatctaacgtaataactaatctgttgtatcttgtaaaatcttatccatagaatgcgtaacactatcacggtacatctccccaaatttcaataaatgtaccatcaataaatataaacgataaaattcaagtctataggatgcaccttttgcgagtggataatgtttattatacgcatcataaaattcgctcgtaaaaccaccaaataccgttgtaataccgatatcaaattctctgtcaccatataatggtgctggatcaaataacgccggacgaccatcttgtaagaacatataattgccaccccataggtcaccatgtaataaagatggtttactttgatgcttttctaattccgccacaatttgacgtcgcactttgtcatatactttgatatcgttggcatcccatagccctctatttagcaactcatctttcaaatgatccatgcgcttgtcgacaaaaatggtacaccaatcgtcttgccaatgattatcaaaagaaatatcgccaccttcataaggtaatgagaagccaaatttgccttcttcttgttgctgactgtgtaattgagctacgagttgccctaattggcgttgactccctgaagccccttcttctaaatacgtcatcactaaatacgcatcaccgttaacctcgccacttgcaattactctaggtgccgtgatacctgcacgttcaaattcatttaaacctgcaatttctgcagcataaaatgattctttacgtccacgttggacaagtaagaaaaatgtatccgtatccgtttcgactcgatatgcttcgtttacatcgccaccactcactggtgaaatctctttaatatcttttaaaggtaaatgctctaaccattgttcattcatacaaacaccttccattacgcttactttatactattatattgcctaattaggatgatttaatctcaattttatttgtggtacttgcgtcaattttcaaaactttttagttttaactaggaaattatgtagggaaatgctagtctattaaaagaatatatttcacatatattaagttgaggatagtaagcctcaaatataatgaaataggagcatactcatgtacaaattaattaaacctttcttattcaaaatcgaacccgaaaaagcacacggactaactatcgatgcattaaaaacgttacaaaaatttccagttttattcccagtcgtcgataaactatttacttataagaatccaacgttatcacaaacgatacaaggtaatacgtacgacaatccaattggcttagcagctggtttcgacaaatcttgcgaagtaccaaaagcattggaacaccttggattcggtgctttagaattaggtggtatcacacctaaacctcaaccgggtaaccctcaaccacgcatgttcagattattagaagatgatgccttgataaatcgtatgggcttcaataatattggtatgaacaaagcactcagtcatttgcgtaaaaatgcttatcaagtacctgttggtatcaatgttggtgtgaataaaatgacaccttatgaagcgcgttatcaagattatataaaagtcattgatacgtttaaacacgacgtttcatttttcacagtcaatatcagttctccaaatactgaaaaccttcaaaatttccatgataaagatgaattttcaatgttatgtcaagctttgacaacatttaaaaaacagcacgatgtaacagtgccaatttacttaaaactaacgtctgatatggatttcgatggcttaaaagcactattaccagcgattactgagacatttgacggtatcatcttagcaaacacaacgcgacaacgagatggtttaacttctgctaataaagtcgaagaaggcggtttgagtggtcgtccattatttgaacgtaatttaaaattgattaagtatgcttatcagcaaacaaatggtgaatttttaattataggtacaggcggcgtattcagtactgaagatgcaatcaaaatgatgcgtcacggtgcgtcacttattcaaatttattcatcacttgttattgaaggcccaggtttaactaagaaaatgaacaaaggcatcacacgttacttaaaagatcatcattttgacaatgtcagtgatattataggactagatgcctaatccaacgtagtcaaataacactttaaaacttgctgaatcgtcttattaaaattatgatataactcaagaagatatatttatcaccatttttcaaaataatggcttaaatatcacatatcattaaatatagcgttttataacggaggcgtttgttatgactaaagaaacagataataaaaaaacagtagcgacttctgacaacaaagacacacagcaacaaaatcaacctgaagaagatgaacgtcaaggtttgaatggttatcgtaaaacagatcttgatttagaaatcgagcaagagctacgtgaaatgatgaaaacaggagaaaatgaaacgaaaaatgactacaaaaagtttaaagtgttttcacttatttcaacacttatcattgtcattttagcaattataagatttgttcataaaatgatgtaattagagtgagacattgttttatgtctcagaatccagttattcatgatagctacaatatttacgatgatataaataacccgagattttagtatgattcatttcactaaagtctcgggtttctatttgataatttttaatagggcatggcttgtatatgcgcctgccttttatcttatttccaatgattaatctggatattgttctaaaaatgctttcgcttctttattaactgttttaaaatcaataccttgttgcatcgctgcaaagacacatccacaataacactgcctaaagatattatagtcattacacatttctatggaacgctcataacctttacttttcttaaaatcacttggcaaatagttcacatcgtatattttttggacatccataccaagttcattgattaattgtgcgttctttttaggtgataacgtgattgcactgccaaaataatcatagccatgttctacagctgctttcgctacaatatccaaacgcatttcaaaacaagcggtacaacgtaagccgccttctttttcatcagctaattctttatccttcaccattttcacaaacttatgcggttcataaggtgcttcaatatacttcacattcgcaccagtcttgcgattaaaatcttccacaaattgttcttgcactttagcacgtcgtaaatattcatttttcggatgaatatttgaattcgcgaaataaattgcaatgtctgcatattgtgttaaaaactctaatgtatatgtactacaaggtgcacaacaactatgcaataagattttaggtctgattgcttctctttcccactgcccgattaatttcttcaacaccttgtcataattaattttttgatttttcattttactgataataggttcagcattaatcatgatttaacctcccacatttaatcattaacttctattatatatgattcatattaaatgtcagtcaaaaaagttagaaattcattttaatgcatttatattttgaaaatcccttatgtatctaaaagcattttttaaacttgaattttaaaacactaaacaacacatacgtctctgtgtcattttcattttttgtatgtcatatatatatgtttacttcatttaaatcaatttcatcttacaatttatcgtgtattttacaaaagattgacttcaattcatcgtaaaagttatacttttgccattttttaatgtaatatagtgttagtaataaaaataatacattgaggtgttttacatgacagcattattcccttatatcgcttttgaaaattcaaaagaagcccttgcatattacgaagaagtatttggtgcaactgacgttaaacgtttagaagttggcgaagaacaagcgtcacattttggtatgactaaggaagatgcacaagaagcaactatgcatgctgagtttgaagtgcttggtgtaaaagtgctatgttctgattcttttggtcgcgctgacaaaattaataatggcatatcattattaattgattatgatgttaacaataaggaagatgctgataaagttgaagcattctatgagcaaattaaagatcattcttcaattgaaatagaattaccgtttgctgaccaattctggggtggcaaaatgggcatctttaccgataaatacggtgttcgttggatgttacatggtcaagactatactgcaatccaacaataacgttattgataaagatatcatttaataagcttatgttatttagcaaggcaagccactcttaattcatggcttgcctttttttattgtatatttttaattatcgttgctggcccttgattgacaatcgtattaaaatgccttattaagtcaactttgtctatacggtttggatcttctacccaatgtcttatcaaagacaatcccgcacctgaaacataactcatgaaataggaaaatggtataccattaatttgatcattttcatttttataacgttgcaaatgacacataattaaatcataaagtttttcgtggatatttgaatctttacccatacgaaacatcaattgataaaatgcgatgtctttttctatcatttctattaaaacggtcataatttgatgtatgttatccgtggataacttaactgctccatttaacttctcatcatgaatgaagtctcttatttcctccaactgctggtcctctaatttttcaagcaaatcatacttatcataataatgcgtataaaatgtactacggttaacatcagctaaatctgcaatttgttgcacagtaatctcttctaattggtgttgatgtaaaagttcaataaatgcatttctcattgcaacttgtgattttctaatacgtcgatctatagtcatttgtatcaagtcctccccaatgattataaacaattataaatgttatgttcattatcctacaaatctccaacattgatgattggcacacaatgtttacctgtttaatataggtgatacaaacaaacagaaaaaggtgataacaatgaaccaacatttactaggaaatccaaaattaactgtaactcatgtcaatgaagtgaaagccggtattaaccacatcgttgtcgacagtgttcaatatggaaatcaagaaatgattatggaaaaagatgtcactgtggaaatgcgcgatggcgaaaaattatatattaatattttcagaccaaataaagatggcaaattccctgtagttatgtctgcagatacttacggtaaagataataagcctaaaatcacaaatatgggtgccctttggccaacattaggcgccattccgacatctagttttacacctgaagaatcaccagacccaggattttgggtgccaaatgattatgttgtagttaaagttgcattacgcggtagtgacaaatcaaaaggcgtcttatctccatggtcaaaaagagaagcggaagattattacgaagtgattgagtgggcagcaaatcagtcatggagtaatggaaacatcgggacaaatggcgtttcttatcttgcggtgactcaatggtgggtcgcatcattaaatccaccacatttaaaagcaatgattccttgggaaggcttaaatgatatgtatagagaagtagcctttcacggaggtataacggatactggcttttatcgtttctggactcaaggtatttttgcgagatggacagataatccaaatatcgaagatttgattcaagcacaacaagaacaccctttgttcgatgatttttggaaacagcgtcaagtgccattatcacaaattaaaacacctctactaacatgtgctagttggtctacacaaggtttgcacaaccgtggctcttttgaaggatttaaacatgcagcatcagaagaaaaatggctatatgtgcatggacgtaaagagtgggaaagttactatgctagagaaaatctcgaacgccaaaaatcattctttgatttttaccttaaagaagaaaataacgattggaaagatacgcctcatgtcatttatgaagttagagatcaattttataaaggcgaattcaaatcagcgtcagcgttccctttacctaacacagaatatacaccattgtatttgaatgctgaaaatcacacattgaatcatgcaaagatcagtagcgcgcatgtcgcacaatatgactctgaagataaacgacaagatgtaagttttaaatatacgtttgacaaagatactgagttagttggaaacatgaacttaaaactatgggtaagcactacagactcagacgatatggatttatttgcaggtattaaaaagttagatcgtcgtggtaatgaagttaacttccctgattttaatcatattgaaaatggtcaagtagctactggttggttacgcgtatcacatcgtgaattagatcaagaaaaatccacaatcgcgcaaccttggcataaacatgaaacagaattaaagttgtcacaagatgagattgtacctgttgaaatcgaattgttaccttcaggcacgctatttaaacaaggcgaaacattggaagttgttgtaaaaggtagtgaaattgtaattggtaatagtacccctggcatgaaaacacgttatgaacatgaagaaaccgtaaataaaggcatgcacatgatttatactggtagtaaatatgattcacaattaatcattcctatcgttaattgatatgcaacaattacggtcgattttgattaaaagtgacatagtgataggactgtataacaagagaaagccacacgcttggaatcttaaaccaaggtgtggccctttttattattgatggctatttaattttataacactatcgtattttctttttcatgaatcatttcaataatgacattgtcttcattcattactgctactttaggtgcatggtttttaatttcttcttcattcaactgtgcataagtcatgattatgactacatcgcctacttcaacaagtcttgacgctgcaccgtttaaacaaattttaccactacctctttcaccagctattacgtatgtttcaaaacgtgcaccattattattattcacgatggctactttttcatttggcaagatgtctaccgcttccaatatatctgaatcaatcgtaatgctacctacataatttaaatttgactcagtcactcttgctctatgaattttagcattcatcattgttcttatcactttattcagctccaattattatattatctattaaacgcgcttttgaaaatttgacagctaacgagataaatatgcgtccagttatttcgtgttgttctactaattgaggataactataaacagcaacttcttcaatgcgtccacttatatgtgattcaagatattgagtaaccttgtctataattactttactttgacgttcaccgtcttgatacaacgcttgtgctaatagcaaacttttacttaaatgtaccgcttcttgtcgttcttgctccgttaaataaacatttcttgaacttttcgccaaaccatctgcttctcgaacgatatcaataccaataatttcaacggcatgattgaagtcttttaccatttgctcgacaatagccaattgctgggcatcttttttaccaaaataagcataatccggcataacaatattaaatagcttattaactactgttaccaccccatcaaaatgccctggacgcttcgctccttctaacacatcagctaatggacctactttgacatcaatacctaattcacctggatacatatcttctactgcaggatgaaaaacaatgtccgcccctacttctgatactaattctaaatctttatcaatttgtctcggataagcatcgaaatcttcgtttggaccaaattgtaatggattaacaaatacactcacaactgtaatatcatttgtactaactgattcgcgtaccatcgttaaatgtccatcatgtaaggcacccattgttgggataaaaccaatcgttgtgcctgagcgtttggctgctttaacaatgtgttgcatctcttttaccgtagtaatcagcttagtcattgttattaacctcattcataattttctttttatacgtatattcttctgatggaaatgcaccagatttaacttcttgatcgtattgctttaaaccatccacaccaacactaaaatcagcaaattgcttcacaaatttcgctttatgttcaataccataatttaacatatcgtgataaaccaatacttgaccatctgtaccttttcctgcaccaataccaatgactggaattgttaagtgcttgctaatttcctctgctaaatcatttggaattgcttcaagtactaacgcaactgcaccagctttttctacatttttcgcatctaaaataagttgctccgctgcttctttcgttgcaccttgtaatttataccccataacgccaacactttgaggtgttaatcctaaatgtgcaacaacaggaataccaattgccgttgctttttcaataaatggtgtaatatgcgctccttctgctttaattgcatttgcattcgtctcctgataaagctttagagcatgatttaagtcttgtgtcatagagatgcctactgcaccaatcggcatatcaacaactacaaatgtatttggtgcgcctctttttactgcacgaccgtgatgaatcatatctgctaacgtcacttgtacggtactttcataacctaatacagtcataccaagtgaatccccaacaagaatcatatcaatacccgctgcttccacttgtttagcacttggaaaatcataagctgttaccatagaaattttagtttgcttttgtttcatatctattaattgacttactgttttcaatgttattcaacctctttttgcagtattattagaaatagtataatgaatcttttatagaaaggaaagaagaagatgttatcagttgcgattatcggcccaggcgctgtcggtacaactattgtctatgaattacaacaatcattgcctcatacaacgcttatcgggagacacgccaaaacaataacatattatactgtaccacatgcacctgcacaagatattgttgtaaaaggttatgaagatgtcacaaacacatttgatgttattattattgcagtcaaaacacatcaacttgatgcagttattcctcatttaactcatcttgcacatgaggacacgctcatcattttagcccaaaatggttatggtcaactcgaacatattccatttaaaaacgtatgccaagcagttgtctatataagtggtcaaaagaaaggcgatgttgttacgcacttcagagattatcaattacgtatacaagataatgcattaactcgacaatttagagatttggtccaagacagtcaaatcgacattgtactagaagcaaatattcaacaagctatttggtataaattgttagttaacttgggcattaattctatcacagcactcggtagacagacagttgcaatcatgcataatcctgaaatacgtacactgtgtagacagctattactagatggttgtcgtgttgcacaggcagaggggttaaacttttcagaacaaactgtcgatactattatgactatatatcaaggttatcccgatgaaatgggaacgagcatgtattacgacattgtgcatcagcaacctcttgaagtcgaagcgattcaaggctttatttatcgacgtgcacgtgaacacaatcttgacaccccatatcttgatactatttatagctttttacgcgcgtatcaacaaaatatgtaagcacatatataatataaaaagaccttaacgatgcatttagaaccacctgttcctaatatcgctaaggtcttttaattatattagactattcagcttctctaatttcttctgccacatctttatagtctattttcgctttaacaaacgtctcgttatttaccgggaaatgttgctggaatgtttcaaagttttgtatctcaacgacaacgtcatccacttcaaagtcaagaacatgtccaccataagctctttcatcatccgcaaaatgtatatgaaaaccagcagaccctacgccatgaaataattctggtgtaaaaaatccaacaatggcaccacgaatatcttgtcttttttcctcaggttgtctgcgtgctgaatcaatcaaacgtgtatatggcggttgctgagcaggcatcattcgtacatgcatatgtttaaatgtgccataaattttaacagccgaaaataaattctcacttaacatttcatttttaatttgtgcgaatacatcatcttgtgataattgttgcaatggaaatgtcttactcgctttaaaattagtaatcgatgcatacggtactttctcatcgccttttaattctataaattctttatgctcgttagcatgatatgccttcccatctaaaaatattacttcgccatcagaccctgttaacgttgcaatccctaaatttccatgttctaacaattcattaattgtagctgttccttctagtaagccagccattaacgtacctaatgtaccatgttgatacaagacattcgtcattccaaaaccatctccctatagttattcctcgttgtcatgctctacttcgtgattaatgcagaactactttcctttatactcaatgacgcctcgacatttctattcatgtcactaaattttcacgagtcataatactttattcaattattattttacgcaaaagtattccctctatcaatgcttgctaaaaaaatagatctatcagtgccacatgttaccgcaacactaatagatcctcttaccattaatatatttctaattaatacttaaaataggcttagtcttctaataaatatttaattgaatcgaaagtatcttctaatgttttaactgatttgtcgaataatgcttgttcttctgcacttaatggcatttcataaattttaactgcgccatgttggttaaccaatgtcggtacacctaagtaaacgcctttgtgaccgccatattgaccatctaattgtatagaaacatttaagacattattttcattatttaaaatggcttttgaaatgcgcatcaatgctaatgcaataccatagtatgttgaccctttagcttggataatttcataagcagcgtcacgtgtatttacataaatttcttccgctttagcttcgctaccagtttgttcttttaatgtgtcatatactgaaatacctgctacatttgcttgtgaccaaactgcaagttcagtatcaccatgctcaccaataatactagcgtcaacacttgaaggtgcaacaccaagttcttggctaattaaatattgtaaacgtgcactgtccaatacagtacctgaaccgataacacgctctgctggcaatccagtatattcttttacaaatcttgttaaaatgtctacagggtttgccgcgattaagaaatatccatcaaagccgctatccattacactcttaacaatgctcttcataatcttagtatttttttcaactaattgtaaacgagtttcacctggcttttgaggtgcaccagctgtaataacaactaaatctgcatctttacagtcttcgtattcacctgctttcacatcaactggtgaaggactgtggactgtaccatggtttaaatcttgaacatctgcttttactttgtcttttgcaatgtcaataattacaaattcatcagcaacaccttgcgtaaccattgcaaaggcatagcttgatcctacagatccatctccgattaatacaacctttttaccaaatgttttcataattatgtctcctaacctaattgaatttattttacacgtgactacacgtaaaaatatctatactgaaattaaagattaacaattttattttattataatattatgctaccaaattacaaacataaaactgagatgtaagcggagtcaaattacactctaacgccaataaatattgatatctcaagctttagcacgtaatttgaaatttgtgacaatttttagcattctaaaattgcgtaatgacgctatttaaaggctttaacaaactattgagctttctatttttttcattttaaaaaggatggctattcgacttaaatgacttactatataacctcctatttttcgccttactctcatcatatttgatgcacctttttatagtcaaagaattacatttcatacaaactaggcaatcagacataaacatgaaattgattttaaaaatataatgcgcaaaattgttagaaaattagcaaaaatagtacttattcatttaatatctgttataatcagttttatcatttaaaaaatctatggatgttatcaagacaagtcattaataagtaacataaagttgtgatttttcagaatttttagacaaaatattgattatttgtgctatgatataacatattaaaaaacaccgtatagaattgtttatgaaggtttgggaggaaagtttatgggaagttttttcaataaaatagcacgaaaagaggatccggctatctatcaaaataaagatggtcatttaaagcgtacacttcgggtgcgtgatttcttagctttaggtgtaggaacaattgtatcgacatctatctttacgctacctggcattgttgctgcagaacatgcaggaccggccgttgcgttatcattcttactcgctgctattgttgctggtttagttgcatttacttatgcagaaatggctgccgctatgccatttgcaggttcagcctattcttgggtcaatgtattatttggtgaattctttggatgggttgccggttgggctttattagctgaatattttatcgccgtagcctttgttgcatcaggattctcagcgaatttacgcggacttgtgaaaccaattggcatcgaattacctgcagcattatcaaatccatttggtacaaatggcggttttatcgatattattgctgctatcgttattttattaactgcattattactatcacgtggtatgtcggaagcagcacgtatggaaaacattttagttattttaaaagtattagctattattttatttgtaatcgtaggtttaacagcaataaatgttagtaactatgtgccatttattccagaacacaaagtaactgctacaggtgactttggtggatggcaaggcatatatgctggtgtttcaatgattttcttagcgtatatcggtttcgattctatcgcagcaaactcagcagaagcacttgaccctcaaaagacaatgcctagaggtattcttggttctttaagtattgctatcgtattatttattgctgtagcacttgtgttagttggtatgttccattactcacaatacgcaaacaatgctgaacctgttggttgggctttacgtcaaagtggtcatggtgttgtagcagctattgttcaagctatctctgttatcggtatgtttacagcattaattggtatgatgttagcaggctcacgtttactttattcatttggacgtgacggcttattaccttcatggttaagccacttaaacgacaaacatttacctaatcgtgcactagttatacttactattattggtgttttaattggttctatgttcccattcgcatttttagcacaattaatttcagccggtacacttgttgcatttatgttcgtttcattagcaatgtatcgtttgagaaagcgtgaaggtaaagatttaccaattcctgcgtttaaattacctttatatcctgtgttaccagcagttacatttgttttagtattgctagtattctggggattaggattcgaagcgaaattatacactttaatttggtttattgttggtatcattctatatttaagttatggacttagacattctaagaaaaatgacgtagctgaataccacccaccaaaataaaaattaaaaaatcatttcccatctgattaacatccagatgtggaaatgattttttattttatattaagataatcgctattaccaaccttgtccagatatgtcatattgatctaagtttcctgcttccaaagcagtcagtgcatcttctatagtgtttaacgccgtgtctaattgctcatatgttattaccaatggcggttggaatcgcaacacatttcctgctacagctataataactacgccatgctcaaagcagtaattacaaattttaagtgccgcactggcatcacgtgttttgaggtttttgtcggaaacaatatcaataccaatgctcaggcctttacctctaacatcgcctacactattgtatttagatacccattgatccattcgtttcctaacatattcccctttttccgcactagcctgaagaagcgactgatcttcaatcatttgaattgtggctaatgcagcttcacaactaactggattagcacctgttgtaaataaatgtgctggtgcttctaaacaattcataatctctttgcgtccaacaattgctgacataggcataccacctgctaaagattttccgaaagtgattaaatcaggcgtaaaattaaaatgcgagactgaactccatgtacctgttctcccaaaaccttgttgaatatcatcgacagcgattaaaataccattttcacgacaaatattttctaacgcttcaaaataccctggaactggttctaaaagtccaccatcgccttgtatcgtttcaataacaatacatgctacttcgtcagcaggtacatatttcgcaaacatttcttttaagggtgctaaatattcttctactgaattagcttgtggctgctcgtacataccacgatatttatctggaaacggaatatgataaaagccattcaataacggaccataatgtttgcgcatatttaaactaatagctgacatagacaacgagccaaaagttgaaccatgatatgcattagtgaaactaatgatataaggacgccctgtatatgctctggcaaatttaatgatgccatcatttgcgtctgatccagttaatccgaaggtcactcttttttcaaaatctccaggtgcaatctcacaaagcttcttagctaaacgtaccaacggttcatgatacatatatgctggtgtataatgaataaatttatcaacttgtgcctttatcgcttctgttacttctctaggtgcatgacctacgttttgagaactcgcactcgataacaaatcgatatatgtctttccctcaatatcaaccaatgttgctccatatccatgatcaataactaacggataatatttaatacgtcctgatttcgcaaaataatgttcatcctcttgaattaattgatgtgctttactcatatacattcccctcccattgacagaccttattcacataattaccttccctacatcgataaccacattcgatttgatatcacgtgaaaatactgtcatgtcattatgaatactatccaatatactaataaaattcagatttgtaaatatattctgataattaagaattttatatcaatctactttatttatgcgcataattttgttcgattagggaattgtttactatattccatttgactctgaggtgatatgaatgcgtttaaaggtattgttccatttcattgctgctattttcatatcattcatgttgctatggatgaccatgttgtttgacataataagcaatcaatcacatttaaaagctttgttattgaatttagattttctaattccttctgacaatacaccatatactctagaaataatatgtcacttactaattggtagcgtcatttattttgtatttgtgttgctgtttcatacttctaaaaggctttactatctatgttatatccctttagttttcttatttatagcattgtatccctttttagtatttattgcgcaacgtccaatttttcaatttagtgtgacagaattaatcggttggattattacacatattttcttcatgtcattaatggcgttagtcatacctagaataaaataatatttttaattaaactgacaattatttttcacattttatacacttttcaaggtttatgacttgagaaatgttctcatttttatcatactggaggtgtattgaaaagttaaggagtggaaagtatgaataaagagcaattagaaaaaatgaaaaatggaaaaggctttattgccgcattagaccaaagtggtggtagtacaccaaaagcacttaaagaatatggtgtaaacgaagatcaatatagcaatgaagacgaaatgttccaacttgttcacgatatgcgtacacgtgtggtaacttcaccttcattctcaccagataaaattttaggtgctattcttttcgaacaaacaatggatcgcgaagtagaaggcaaatacactgcagattacttagctgacaaaggtgttgttccgttcttaaaagtagacaaaggtcttgctgaagagcaaaatggtgttcaattaatgaaaccaatcgacaacttagatagcttattagatcgtgcaaacgagcgtcacatttttggtacaaaaatgcgttctaatattttagaattaaatgaacaaggtatcaaagacgttgttgaacaacaatttgaagtcgctaaacaaattattgctaaagggttagtgccaattatcgaaccagaagttaatattaacgcaaaagataaagctgaaattgaaaaagtattaaaagctgagcttaaaaaaggtttagacagcttaaatgctgatcaattagttatgttaaaattaacaattcctactgaagctaacttatacaaagacttagctgagcatccaaacgttgttcgtatcgttgtattatcaggtggttacagcagagaaaaagctaatgaattacttaaagataacgctgaacttatcgcaagcttctcacgcgcattagctagtgatttaagagctggacaatctaaagaagaattcgataaagcattaggtgacgctgtagaatcaatctacgacgcatctgtaaacaaaaactaatttatacattaaacgtattttttgatataaactactaaaaaggactcatacatgtgctttaaaggcattgtgtatgagtctttttgattaaagttgattttgccgtatgtattagattacgtaaaaaaatcggacagctgaaaaatctttaagatttctcagttgtccgattttaaatataactattagaatttagttttcgtagtaacctaattctaagtcttttgaagtttgtttacggatttttctcattaatttttcgtcttcaattaatgattcaccgtatgatggaatcattttcttgattttaggtgcccattcagttttgtattcagggaagttacgttctaatacttctaacgcaactgaaactgaagttgaagcccctggtgattcacctaataatgcgattacagtgtggtcttgtgagttaaccacttctgtaccgaattggatgaatcctttaccgtgttcaggtgtatctttgataacttgtacacgtttaccagcagtgtataattgccaatcttcattacgtgcttctggatagaaagtacgtaagtggttcatacaaccttcttttgtcataatcacttgatcaaatgagtatttaattaaaggtaagtttttaacagctgctgctaataaagttgtaatgttgtatgttttaactgatttgaataaatctaagttagaaccatttttcaagaatttaggtccaacattagcaaatggtccaaataataatgttctttgaccatcaatgtaacgcgtatctaaatgaggtacagtcattggtggtgtaccaggtggctctttaccataaactttggcatcgtgttgttcaataacttgtgggtttgtacaagctaagaattgaccactgatagggaatccacctaaatgtttactttcagggatacctgttttttgtaataatggaattgctccaccgccagcaccgatgaatacatagtcagttacttgtttgaatttctcaccagttaggcgatttttaacagtaacttcccattgaccatttgataattgttcaaaatcaacaacctcatggttaaattgcacagtagcatttggatgtgcttcaatgcttttagccattttacgtgttaattcaccgaagtttacatctgtaccttcgtcaattttacttgccgccatgataccagggttatcttcacggcctttcatcatcaatggaatccattttttcattacttcgatgtcttcagtatattcgatattatcgaacatagggaaagctttcatcgcttcgtaacgatcttttaagaatttaacattgtttttacctctaacataactgatgtgtggtaatggattgataaattctcttgggttctcgatgctaccgcttttcactaagtgaccccagaattgttttgaaatctcaaactcttcgttaatcactttcgctttttcgatgtcgatagaaccatcaggttgtaaaactgtgtagttcaactcacataatgctgcatgacccgtaccagcattatttctttcgtttgaactttcgattgcaggacgatccaagcgttcgtaaacgtggatattccagtctggctcaatttcttttaacattgaaccaaatgttgtgctaagtacaccggctccaattaaaacgatgtctttactattagacttagccattggtttcacctctccaaaaattgtaaatgtgtatcatcaatatgaaagttacataaaactgacatatttctttaaaatatcaacgccatagataacttcctgttttaattgatacgctgtaacaaaatactatagttagtgcttacatgtatatgttaaagcaagcagtggtaaatgtaaattataattattcattaactttgcaatatattaaatcttttattcatagaagataaatatcaaatcaatcataattatttgacaacaaatagctaacgattgttttaatctacatttggcttatagcattttaaacctatactctattttgatacaatataagtgtaaaatcaatcataaaaaggagattcaatgcctatgcatccaagaaaatcacttcaattacctttaatattgtaaattattttgaatcttgcacttataggcattgtgattatcgttttaacacatactgagtttcaacttaatgccggtgatagtaatgtttttttattaaactgggatattcgaggtttaacatcttatattttctcattcttaatactggttgcgcttgtttctaaactaattttaatatttataactagacgacaaagaacatcataaataaacaagcagtccagtgcgtatcatcataccttacgcattggactgctttgctatgtttattgattgctatctttttgttgttgccatttttctatttcagcatctcgtagttcaacacgacgaattttacctgagtttgtttttggtaagtcgtcaacgaattcaatctctcttggatatttatatggtgcaacttcatttttaacaaattgttgtagttctttaactagcgtatcatcacccgcagtatggtcctgtaaaataacgaatgctttaacaatatttcctcgtatatcatgaggttttgctactacagcacattctttaacggctggatgattcgttaacgcatcttcaacttcaaaaggcccaatcgtatagcctgaactaataataatgtcatctcgacgtccttcaaaccagaaataaccatcatcatctacatgagctaagtcaccagtgatgtagtatttacctgtttgcactttcgccgtacgttctggctctttataatatcctttgaaaagtgctggcaaatcaagtggtactgcaatattccctttcgtattagcaggtacgctattcccctcatcatctactacagtgaccgaactacccggaatgcctttacccattgatccaatcctttgtggtgtatcttttaaaaagcctataagcaaggtactttcagtctggccatatccatctcttacagttaaattaaagtatttcttgaattgttcaactacttctcgatttagtggctcacctgcagaaacggcactatgtaaatgcgttaagtcataatcatttaagttctgtaatttagccatcatacgatattctgtcggtgtacaacataaaacattaatttgatatttttgaagcaattctaagtatgtctcagggctgaatcttccattaaatacaaaagcagttgcacctgaacctaatacagataagaaaggactccatacccatttttgccaacctggtgctgctgttgcccaaactaagtcatcttcattaatacataaccaatgttttggtgccatttgtaaatgtgcaaatccccatccatgacaatgtgtaacggctttaggattgccagttgtaccagatgtatatgacagaatcgccatatcatcacgcgtcgtatctgccatttctagtttgttacttgcgttttctttttcagcttcaagtgaaatccatccatctttttgaccggcaataacaaatttagttaacgcatcatattctttaattttttcaaattcaactgtgaatggctctagtgcaataacagcatttatttcaccgtgtgtgatacggtattgtaaatctttagttcttagcatttcagaacatggaatgattgcaacacctaattttaaagcagcaatatataattcatatgtcgcaatagatcgtggcatcataatgagtactttatcgcctttagataaaccgtgcgatgctaaaacattacctactttattagactgttcaatgagctgttggtaagtgactgatatatcttcgccttcagtattatgatataaaattgcctttttatctggtatgtggctatatttttcgatttccgaaataatgttatatttttcaggcgcgaatagagctgacttttgcataactaacttcctttcatacatccacttttcctgtgatgaacattgtaattttataaatgaattatatatatcatacgcctatctttacagaattttcaattaaatagggttaaataccaaagtcctcgacactacgctttgacatgacatagcattcaaggactttcaaatgattgagggttgatatctcgggctagagcatatcagctaattcaatacgaatattgtatgataattcacgattaattatttttacatctgcacctttcgaagtgccacgatgcttgtgtgtatgcttgtactcagctgaattttgccaatgataaaatgcttgcctattttcccacagcgtaataatgatatagtgtctaccagctgttctaggtcttaaaaaccttaatgctttaaacccatcaacgttttgcaaatgcttattacgttgcaaaaatttttgctcgaatgtttcttcttgtccttcgttaatatataaatgatttaacacacataatgtatcatttgataaatcatttatcgcttctagcacatcgtaatatgcagtgtcattatttttttgtattgtgagacaatcatccagttcttctattacataacttctatattcatcataaatgttcataataaatgccttcatttcatttatatttttggtcatattactttatatctattactaattcattcctgtatttattaattacaatcatagtttgacttctttttaaaagataaggctttgtaaaaagtattaatattccatacaaatggggacaggcgtcgcccattatttttgtgtcttcaattccatgatcattatttaacattagtcatgaaaatagccgacaacttcatctatgaaattaccggccttgtattttagctaactttatctctaattttacgattttaattgatcatacagagaaagtgatctttttacaatttctaaaaactcatgatctatattggacatttgatgaaaataagacaaaatgttttctgttagattctcttgttttgggaatgaatcatcttctttaatccaaatcgctaattcgcctaatggtgttttatcatctttaaatgtttgtatatattcgtaaaagctcatagtattccttctctcaatttacttatataaatcctaccacgaaagctttcaagaaaacacaattaaatgtctatttagtgaactttttaaggttgtacactcttttaatgtctgtcaattaggtcaattaatcatcacaatgtacaattaactctattttcagttcatattctcacacaccgtttttgaacaacacattaacttctcatttagataaaacgcaaaaaagcctggcaccaatacaatagatgccagactaaaagtctactatatcaatttatttagcgtatggttttacttcgattgcaccttcattttcatcatgaacaccatgcttataataatcaatatattgtggctctaaaggctttctgccacgtataatgtctgctgctttttcagctaacattaaaacaggtgcgtgtatattgccatttgtcgtacgtggcatagctgatgcatcaactacacgtaaattttccataccatgaactttcattgttaacgggtcaactactgccattggatctgaagcaggacccattttagcactacaagatgggtgtaatgctgtttcaccatctctacgaacccaatcaagaatttcttcgtctgtttgcacttctggtcctggtgaaatttctccaccattgaatggatccattgctttttgagataagatatttcttgctacacgaattgcttctacccattcttttttatcttcttctgttgataaataattaaagcggatacttggtttttcgaatggatctttagatttgattttcaagctgccacgagagtttgaatacattggtcctacgtgaacttgatagccatgtgcgaccgctgccttttgaccatcatatcttacagctattggtaagaaatggaacattaagttaggataatcaacttcgttatttgaacgtacaaatccgccaccttcaaaatggttagatgctgctgcaccagtacgtgtgaaaatccattgtaaaccaataaatggcatgcgcttgatatctaagcttggctgtaatgatacaggttccttacacttatgttgaatgtatacctctaagtgatcttcaaagttttcacccacaccaggcaaatgaacacgtggctcaatgccttttgattttaggaattctgaatcgccgataccagacagttgtagtaattgtggcgtattgaatgccccacctgacaagatgacttcattagcatcgatggtatgtagtttgccatttttcttatacgtaacaccagttgctcttctaccttcataatgaatttcagtaacaaaggcacgtgtttcaacggttaagtttttacgcttcatagctggatgtaaatatgctcttgaagctgacattcggcgaccacgatgtacttgactatcgaacggtccaaaaccttcttgtctaaatccattcacatcaggtgttttatgatagcctgcttcaacacctgcatcaaagaatgactggaataaaggattcgttgctggccctcgttttaacttaattggtccatcatggcctctaaatttatcataaggcgctgcaccgtatgttttttctaattttttaaaatacggtaaacagtgcgcaaaatcccaagtttccataccttctggttctgcccagccttcatagtccattggattaccgcgttgataaatcatgccattaatcgaacttgatccacctaaaactttacctcgggcatgtgctactttacgaccgcccatatgtggttcttcatctgttgaataaatccaatcgtaaaatttattgcctgaagggaacattaacgcagcaggcatttggataaataaatcccaaaaataatcactgcgacccgcttctaatactaagacttctttatctttatcttcactcagacgattacctagtacagaacctgcactgcctcctccaatgatgacataatcatatgatttatttttgttactcatcgttatgacctccaaagtttgttgtatttcaaagtgagtattgcatgaaatatttgttagtggctgattggttatcgttgaattgctaaacttagctaaccaaaacactcgattttccttttatgattgttactaacagtcatgaaataatctatgattcattttgcgtttagtccaaattatcaatcaacatttcgccacttatacaaaacaaagtgagtgtcttgtgttcttacaatggcactcaccttatctaatttttatttgctaaaccaattcactaattgtggatttgtatttgttaaaatgtgttttgaaacaaggtactcttctaagccttctttgcctaattctctaccgatacctgattgtttgtatccaccccatggcgcttgtgcaaaatatgggtggaaatcattaatccacaccgttccaagtttcaacttgttagcaacgcgttgtgcttttccaatatctttagaaaatacagcacctgctaaaccatatatagaatcattcgctaattgaatcgcttcttgttcagtttcaaagccttctacagtaacgacaggtccgaaaacctcttcttgtacaatacgcattgacgtatcacaatttgtaatgactgttggctcgaagaatagaccatcttttaaatcgtctctatctgggcgtttaccaccaacagcaattgttgcgccttctgctttagctacatccatataagattcgattttattacgatgttctgttgaaatcactggtcccatttcagtatcagcatcaaaaccattacctaatttgatttttttcacgcgatcaataagtgcttgctcaaatttgtctttaatactgttttgtactaatattcttgatcctgctgaacaaacttgacctgcatggaaatatccaccatttaacgcttggtctaccgccaattcaaaatcagcatcatcaaagataatgtttggatttttaccgccaagttccaaggcaatattcgtaacattattagcagcatttttcataatatgcttaccagtctcaatgccacctgtaaatgatactaggtcaatctctttatgacctgacattacgtcaccaacttcagaacctgcaccaagaataagattaattgttcctttagggaaaccaacttcttccattaattcaaaaacacgtattgttgttaatggtgtaatttcacttggtttcataactagtgaacaacccgtagcaagcgctggcgcaattttccatgatgcttgtaataacggataattccaaggtgtaatttgtgtaactacacctactggttctttaacaattttgctttctgtatctggtattggtgaatcaatcatttcgccaccatctttatctgctaatccagcaaaatacataaacacattatgaatatcatccatatctgcatatgattcttctaacgtttttccagtatctaatgtttctaatcgtgctaacgcttcgcgatgttctttgatcttgtccgcgatggcacgtacttttttacctcttgtttcagcagtttcttgcgaccattcaccagactcaaacgcacgtcttgcagctaagattgcacgttctgcatcctcttttgtcccttcagaaaccgtaaatatcacttcttgattgtaaggattgataatatctcttgtatttttattcgcgctttcaacccactcaccatcaatatattgacgctgagataaatgttttaaaagttccattcaacaacctccgttaagtttgttaaatttttatttaacgaattttacaaacttatgttagcatagaaatgaaaaatgtgtcaatttacaaaacaactcaagaattaagttttgtaagttcgttagatttttgtttaacgaaacatttaactttaatgctttaaatatttttaatgtctttttttagaaaaggctttataatgtattagtatttattttaacgtgaccaaaatgatgtacggaggtgcaatgatgactcgttctcagaacaaacagcaacaattagaacaagcaaaagatattgtaattaattcaattggacagacaatggatttgtatggcactaatagaagtgtaggaaacttatatggcactatggtgtttgaaggcagtatgacgcttgatgaaatgcgtcatcaattgcaaatgagcaaaccaagtatgagtgctggcgttaagaaattgcaggaatttgatattgttaaacaacaatttacgagaggaagccgcaaacaacattttatcgccgagaaagactttttcatctttttccgaaactttttcactaaaaaatttcagcgtgaaattgatatcaatgtcgaagcagtaaaagatgctcaagctattatcaatccattacttgaaagcagtgatttaactgaagctgaaacacaagaggcacacaaaattaaagctcagcttgatcatacacatgtttattacgaatggttagaacagttaaccgaagcgattgaaagcggtgaaatttttaaatatttcccaattccagaacagtcttctgattctaaaaattaaaattgactcaaacaacgacaatgatgattatgcatgatgaaaacaatgcaataggtccacgaaataaacggtaatttctatctcaataaatagaaattaccgtttttgcttaatatcacgattaatcatatacttataaaattcaaaatcttatgcatcattaattgaattataaattatcgtcttgttcttcttctgatacttgaacgattcgcaatgagcgacgttcaacttcttttaatttttcagcccgcgtttcaagtttaattctatcgcgtcctaaaatgattaaaaatgatatcatcatgaaaataaaaataacaattaatggcacacttgccagtattgatgcagttttcaatacttctaatgcacgttcaccaccaactagcatcaatgaaaatggcaataagcacaatgcaaacgcccagaataaacgattggcacgtaatggttcgcctaccacttttttctgagatgctgccgctaaaatatatgaacccgaatcaaatgttgttgctaagaataagaaagcagatactaagaatagtacaatcatcaatgatgggaatggtaaatgatgcaccacttcaataatggttgcctctgtaccatgtgtatttaaatattgtgttacattaaactgtccagaaatttgtaaatacacagcatagttaccaaaaataccaaagaataatacgcatccaagcgttccataaataattgttcctagcacgacttctttaaggcgtcgaccttttgaaattctagcgataaataaaccgataaatggcgcatatactaaccaccatgaccagtagaatattgtccagtcttgtgggaaattcgtttcttttcgacctttaataccaccgaatggttctaaccatgttgccatatggaagaaatctctcaacatatttccgaaccctgtcactgtcgtttccataataaaaacagtcggtccaataataaatataaaggctaaaagtacaaatgatagccaaacgttgatatcacttaacttttgaataccttttttcaatcctgtatatgaactaatggcaaatataaccgtgattgttaataaaatggccgaacgtaaaatcatatttttaccatctaaaccagttaatctttctatgcctgcagaaattaatggcacacctaacgctagtgatgttgccgcaccacctagcaatccaaagataaataagatatctacaactttacctacaaatttatctgtttgaccttttaaaatcgggcgacaagcttgactaattttatacaccggttgttttttaacaaacactaaataaccaattggtaatgctggtaaaacgtaaatagcccaagcaattggtccccagtggaacataccatattgcgtcgcatattggagtgcttcatcactcatacttttcgcgccatttggtggaacttgatagtaaaaagcccattcaataacgccccagtataaaatatcagagcctatgcctgcacaaaacagcattgccgcccatgtaaatgtattaaattctggtttatcacttgctttaccaagtgtgacattaccatatttaccaaatgcgatatacattacaaagcaaaaaatcgccagccccataaataaatatatcgaaccaattgaatcagaaatggcactattaataccagtgatgatatcttcacttgcttttggaaaagccatcataggtataactgcaaaaagaagtacagctactgtccctataaaggtcgtccagtccataactttctcttttttcaattgtgctccccctaattattaattttatgaatcctgtttcgatttatctcaaaatgtaataattatattgattcacaaaattgacaataactaatatttaataataatgcaaatttcatacaatttgaaagttggcaattattgaatatttatataatttttctcgtaataaacaaaactttaatagcgctaaaacaactgtgttaagttatgatttaacgaatttaacaaattttactaggatggcatttaagaatatttatacgttattaacgaatatttatttattgtaaaacgctaccaaaaagttagacttccttcccactaaagtaccacttttctctttcaactttttttaaaatgtatatgcaacttttagtattagtatcaaaatgattgttaggtcatattctatcaatatgtttttctaaagaattgcttttatcaactttcaattatgtgcctaacctaaaaagaagccaaggcaacggatgttaccttgacttctaatacatattcaactaacaatatattcaatcatacgcgcatgcgagagtgattgttgtacatctataatgcgttgatttaaagaacctttatatggtaaatcaggtttgaataagtgttgtataaatagcccatctactaaaacgtcaatgtatgataataactctcgacgttctgtacaatcatttgctaaatattcatataaaaatccagtccatacccaaattgtctttgtatttccaaaacgtgctcgaaatgctttgacaagatttaatgtaatatccaaattacaaaatggttcgccacctaatagacttagcccagatatataatcatgatcgcaatcatctaatatttctgctaatattttatcagtgtatttctcgccatatctgaacttttgtgaggctttgttgtaacatccaacacaattaaatggacatcctgatacataaacactgcatcttactccttcaccgtcaacaaagctatttgattctattttagcaatataaccttgcccttgtttaatgtctaaaagtgtcattctttaggcgctttcatatgttttactcgtgcgcaaatttctttatgacggcctttaattactggacgttgaactggattgcctaagtaaccacatgttcgtttaacgacatcaactgttttaggattatcattgccacagttcgggcatttaaatcctttttcagtagcttcaaaatctccatcgtaatcacattcataacaatgatcaatcggaatatttgtacctaagtaaccaactttgtcataagagtagtcccatactgcttctagtgctttcaaattgtgttgcagtttcggatactcacaatagtgaatgaaaccaccactcgtataataaggataatctttttcaaaatctaacttttcaaaaggtgtaacatctttacgtacatcataatggaaagagttttggtaatatcctttatctgtaatgtctttaatatctccaaatctctcttggtctaaacgacaaaaacgatccgttagcgattcactcggcgtactgtaaatactgaaccaaatgtcatataattctgtccatttcgtttgataacgtttcatttctttaagaatttcaagcgtaaatgcttttgcttcttgagatgtttcccagtttggaccatagaaaacagtagctgtttcatacaaccctatatagcccattgaaatcgttgcacgtttatttttaaataactcagcaacatcatctgtttcttttaatttatagttaaaagcgccacttttatataaaattggtgcgttattcggtacagcatctttcaaacgatttatacgataaagtaatgcatcatgtaacacatcgatacgttcataaaagatttcccagaatttcgtcatattaccggcagattctaatgccattctaggtaaattaagtgtaacaacaccaagattacaacgaccattattttcaaaatgaccttccgcatctttccaacttggtaaaaatgaacgacaacccattggcgctttgaaatcacctaatatttctacgagtttgtcataatttaaaatatctggatacatacgtttcgttgaacactttaatgctaattgtttaatgtcatagttcggatcttgcggactaaagttggttccttttttaattgaaaatacaagtttcgggaaaatcgctgtcgtgcggtcttttcctaagcctttgatacgagtatttaagatagcttgttgaattttgcgacttaaatgatctgtacctaagccgaatcctaatgttacaaaaggtgtctgtccattagatgtatataaggtattaatttcatattctaaactttcaatcgcatcattgatgtctttagtgacttgttgatcaacataacgatcaatttcagattctttgacaaattgctttgcgatattcctatgttgttcttcattatgtcgtgcatatgtactaagtaattcgtcaacgcggtcaaccgtacagccaccatattgactgctagaaacattggctataatttgtacaagctgcgctgatgcagtttgtattgattttggtgaagttacattcgcgttgcctatttcaaatccattatgtagcatatttttagcatctattaaacaacagtttgttaatggttggaatggatgataatctaagtcgtgaaaatgtatgtcccctctttgatgtgcatctgcaacatgctttggtaataaatgatttaatgcgtaagatttagaaacgatacctgctgttaaatctctcattgttgaaaatgtatcactatctttgttggcattttcgttaacaatagcaggatctttagaaatcaaacccgttaatgcttcttcgatttgattcattttaccccttcttcctatatattgtgtctactcattacgttataccactatatatagtattttcaaatttttattagtctgttaactaaaacgtcacaaagttattaacatttagtgaaattcatatttctacacaattatttcattaatttttaaaattgttctcgaatcgttccgtcatttcgacatctttatgcaactattatttcattttgtaacgggagcatagtttctattttttcatacttaaatcgtcacaattcccatcaacattgcaattactaacataacgatggcgaatccccaaatccaaaagaatgcatacttaatatacgtgcccatgtttgcctctgctaaaccaattgccaaccataaggctggtgaaaacggactgacaaatgtacctataatattccctatgaccattgaataagcagttgatacagatggtacaccaaattgccctgctgtttgttcgacgatcggtaacacagcaaaataataagcgtctgtgctagttaataaatctaatggtacgccaagtaaacctacaataatatgcaagtatggtcctacttctgcaggaatcactttgattaaattcgtcgcaatcgctttaagcataccggtttcatttagtacacctaaaaacatacctgctgcaataatcactgcagccatcattaatgcattcggcgcatgcgctcttaatcgctccatttgttcatccactgatttaaaattaataacaagcgccaatgagacacctatcatgaatgcaaattcaggtggcgcaatatttattaacatcgctagaataacagctaaagttaaagctgtattcacccattttatccatggttttgttcgtgcacgtccttttacaggaaaccttacatcttgatctcgttcatatacttcaactaatttatgtacatctatatcttgtgtttgcggtaattcatttctctctattgcttttttaatacgcttttgttctttaaatccaagataaaccgcaaataacataacaagaatgaaacctattatttgaataggtattaatccaaaccataattcattgacacttttagcttttaaaacagcagctacccgcgccatcggacctccccaaggtaccatgttcataatcgccgcgcttaatgctaatagtagaatcaataaatatttattcatatttaacgctttatataaaggtaataaggcaggaatagaaagcaaaaatgttaccgcaccggcaccatctaattgggctattgtgccaattaaagctgtcattgcacagacaataatgacattgcctcgtgtcattaatattaagcgtttgacaagcggcttgaataaaccactatcgttcatgatgccaaagaaaataatggcaaagataaacataataacaacgttgatgacttgatctaaccctttagcaaaaaatccaaccaaatctgtcacactatatcctaaaatcattgcccctaagcaaggtatgattgtcatacctacaactggatttatctttttggcaatgagtaaacctacaattgaaataataataatgagccccattactgttaaccacatattatcactattcatattattttctccctccacttttaatacaatttacataatccccctctttaacttaaatataataattaatataattttttatatttaagttaactcattttatcaaaaatttcttttttgtgtaactatcaatagtgaagtttgattttcctacttgataacatggcatgactaatccttgtatatcctgtcctgtatttcattttgatttatcatttttattattgctttctattgcacaaaaaatctggctaaaggtcgctatgatagtcacgacttcaaccagatttcaatttatccatctattttattaagtttgttctacgtattttttctctattgtaatattcatatttaaaacgcatatcattatcgcttaaatccttcattattagactattcacaaagccacccatgtcttaatttcaatgattaagcgttaaagttaaaataagaagacttaccttagacggttagacggcccgctattattgtcttacatccaaccacgctaaaaattgagcttgtttgtcatgatttaaatattcttgtgacacaatttgtgacagtaactgttgcttttcgttatatgttatatctagtaactttattttctgtcggcaagtatataaaaagtcgatatacgaactatatgatggtggatataacgcctcaagctctgccataatcgattttgtcaacttaggacttgcgccatctgtagatacactaatagttagcttgtctcggtgtagtgcacttggaaatacaacattgccatttgatgcatctccaacattattaaaaagggcatgctcaggtaaggcttgttttaccgcttcattgacacgtggctcattggttgctgcaataactagatacgcgtctacaatatcgcttggttcaaactcttttcccttccatatgacgacacctttatctaccatattttgaagtttttcagtgattgtcggactgatgaccgtcatatgttcaacgtattgacttaatgtttgtgcccgacgacttgcaactgtacccccacctactataaccacgttcttatttgttaaatctatcatcaatggcatactcatattgcgctacatcctttatatctttttacgtcatttcaccttaaaacatttaacacattgaagcattaataaacatcgcgttgataacgttgtcgctgtttcatttgacgcaatatcgtctcagcttcttcttgagaaatatgacgttcttttaccaatacatctttaatggcttgatggacatctttcgccatacatttttcatcgccacaaatatagattgctgcgccctgctcaatccattcattgaaacgttcactttcttccattatacgatgctgtacatattctttgtgttcttggtctcttgaaaatgctaaatctacgcgtgttaagtttccattttcaagccattcttctatttcttcttcatataaaaagtcagaactacggtgttgatcaccaaagaacaaccatgtttttccagtcataccaagttcttcacgttcttgtaaatatgctctaaaaggagcaataccagtacctggaccaatcataattaccggtatatcttgcttcatcggaaatttgaagttcggatttttcttcaaataaattggtactatatcgcctggtttaatacgctcagcaaaatgaaccgagcatacaccttttctctcacgtccatgtgcttgataacgaaccgtaccaacggtaatatgcacttcatctggcgttgccataaaactactagaaatcgaatactctcttggtggtaattttctaaggatttgatacatattctcaggttgtaattctatagttggaaaatctgttattaaatctataaagtcccgatttataacatattcatgcgcccatgactcatcttgaatacgttcagataattcttcattgtcaaaatagatatctgcatttttcaataatggcaatgttaatttagtaaattcaaaatgtgatgttagtgcttcagcaataggaactgtatcaccatgatcattaattggcaccggagattgcggatcccaacctaacatggatattagtttttcaaccaattcagggtcgttttgcggtaatgctactatacaatctcctggttcatatgattcactaaaatcatcaagtaaaaattctatatgtcgtgtttctttatttgaatcggtaccatttaaattgatattccctaatacttctgcttggtatggatttgatttagaatatttcttttctttggcagacttaattgattcacttatcaccgattcactttgaataccttctgatgtggtatcaataatattaatgatgtctgccatccacttttctgcgtcttcttcataatcaatatcacaatctacacgcttacatatacgctcagcgcctagattttctagtaaagcatctacatctttaccggcttgacagaaaaattcatatgtttgatcacctaaagctagtactgaatatctcacatgatttaaattaggtgcgttatcgtcttctaaaaattcaaagaaatcccatgcattatcaggcggttctccttcaccatgagtagacgtaataataaataaatcttctaactgtgcgatgtttgtcgtatcatattcatccattgacatcaaaacaacttgatgtccaatatcacttaatcgttctgaaaaaatttcagctaaacgcatggcattacctgattcagaaccatatagcactgtgacatgccgctgattagcttcgatatgtggctctttattttgtaacatatacgttgttgaagtttcttgttcttctgatatttgtgattgttgccacacttctgtctctaattgttgttgattactatcacttgtcgtatcgttactattagctagtaaaaaaccactaagccactgttgttggctctctgttaatgtttgcagcagattgttaatctctgtgacttgtttttctgtaaatggactattagatgtatttaatttcaaatattttcacctcaataaacttgaaatagatgattgactcatttttcatcgatagttcagtcaattttttaatatgtatggtataaattaaaacaaacttgagttgtgtctgatagttatacttacaaatatttacaaccttcatgtggtttgaatgacacagtaattcagacaaaactttgattatgtcgtgtcagttattaatgcatacagtcatgcatcgttgttattttttatttatttactatttattatgtaccaaatcagcctttcagtaaaataggtcaaattactgattttctaaatataaaatgcctcctaatgacatactattagtacatcattaagaggctcttgtgttatttgcatactaagcgctcaattttaaatttaagatgaagattcttgcaataatatttctatatttgccgatatatccaatggatcttccattggcaagaatcgatttacaacattgccttgtcgatcgattataaattttgtgaaattccattttattggggacccaaagattcctggttgttcattctttaaatgcgtaaataacggatgttcatcgttcccgttcacagatattttagctagcactggaaatgtaacaccaaatttctcacgactaattttcaagatttcttcattagaacctggttgtcgattgtcaaaattattattcggaaaactcaacactacaaacccacgatccttatatttttgaaacaaagtctctagttttttcaattgttcgctatatatacattctgttgcagtattaacaactaaaatcactttacctctaaatgcttctaatttataagttaagcctttataatcacttacttcgatatcatacacatttctattattcataagacacccctacacagccttttttatattgaatatgttctttttagaatgttctgataaaataagtgcgcgtttacaccgcgaatacacattatatagcgtgatacatttttcaaacacacgataaataatgttcgagtttatgttgttgctcaacctatccgatttaccgtcttttttcacctgtcttactttattaaaataatcacattgtatagctgtattagtccagctacaatatctttcgttataacccctcattataatcatccttattttctatttttaaaaagacaattagaccgctctttaaactatagattaatacttaagttaaactcatacatactgataccatacgttaaatctaacaatttaaaattcgttataactatggattaaagagctgcccaactcatttaatccttaaaaacttcacatgtgattgtttattaagccctcctttatcttattaaatatccttataacccttttaaaattaaactgacacactcatacattgttacacgcgacgataaacgtcatattattgcatatcattaaaacaagtcactttgtatcgtgtgcgaccgaatacatattaaatcatcaataatgattattcaattattaaaaataaaaacgaacattctatatagagtttccacttattgttttttcagcattgtcttcattacttaacattcgtatttgcaagtaatattgaccaccaatatttagacactttataagtatgccattcattatttttaatcatattatttttcatattgatatttctatacatatatttctgattgtatatttagatataatcatttgttattggaaaatatatgaaataaatttgactcatctttttcaatatccaaatgacacgatgtatgatttttgaattttgtaattaatttaattttaatttcctttaaaattagactgaattgtgacaattttcaaacattttaatgtgtaaatcattggaaaatatatacgaattgcatttaaatcgtcaatttacatatatttttgcgtagtaatcaatcgttatcattgttatttatcgttacattacttcgagtatcagtatgtatttcgggcttcgtttgataacgacatttctttgtgacatcgcttcatcagtgtaactacaaatacaatgatttcgtgatgttagttacccattttatgtgttgcataaaatatgttgttataaaacattttaaatcattttatataaacaagctatatatttttgatatttcaaaaatataacttgtcatacaagtaaaaaaccgataagacattttatcttatcggttgaaaattgttattgttatttgtagtatttttaggttttctttttcatataatatatttcagtgaaaacacatgattgattgtgatttcactgaaacatggttaattgcgttgttgatgaataactttagcataaatgtaggaagttattttgtacatcgccatatatagaaacgaaattataatgacagctagtacgtaacatgttaaaaatatatgatggttattaatccctagcatatttagtaacgtataaacaatgttgctagaaattaatgtatgaatcagtgctactgttattggtattgcgaacaagaaagtcatttgatttcgtgttatctttgatattctcccattatctaaaccaagttttttcataatgtcataattgtgctgatttgcataggcttctgaaacttgcttatagtacatcattagaaatattccaatgacaagtacaattgataccacgccacctacaaatattagtccacctgtcagacgatcccaaaccattagcatttctgatttagaatttattgatgcatcgtactttttcgaaagcttttgaatttgtgatgttgttaatttcgtctttccagatacattaaagtttatcgatattgtcgacttcttttgttcatgtgcataaaatccttttactttttgtaattgattgttatctttaacaattaaaaccatactatcttgaatcatcatcaaatttaacgcatgtgcatcaagttgtttcactttaaagacttcattattaagaccgaccttagactgctttttaaaaataggtacattcgtaatcatacctatactttgattgtctaagtgtaatttgttttggtgatatcgattataatcttgcacagtaagtgctgtgatcattactgattgcttagaaaatatcgagccttcattaccaatgaagtctattggaatatcatcactagcctgttttaacttgtaataagcacgattcttttctaaagaagctctaaataatgtcgtttcatatactttgaagtcttttgcattaaccgaaccctgtatatcacgtttaatatgctcaatcgtttgttgacgttctatttgtgacttagaattgtcgttaaatgacaaatcataatcattggtaatcaacttcataatggtatgattcatatcgcgataggttgttagtgtcattgtgagcgttacaatcaaaaatgtacacagcaaagtgattgttgcaagactgactgcattcattttaagacgtacacgcatcccaactaccacaaaaaaataccgtggatgatagtaaacttttgatacctgctgcaatatactaataattatttcacttatacctacaaaaaatgcataagtaccgataataactaatcctatgacaatccatattttaaaaaaagcaccaaacgtcgtatcttgttgtaatgcaataaaatagcctaaatatagtgctgcgcttcctataacaattaaaacgtaacgcaaccatcgtgatatgacactggaatcggaacgatgttgataagttatcggtcgttgaaaattaatactgaacaagttgaatataagtagcatgcccattaatacagcaatgataatcaaagtaataaacatcgctacagtatcaaatggataataccttaacgtagcaacctcactgcccattattttctgtataaacaagaaaaatatcgcaccaagtaagtatccgccggcaatactaatgactgaaattatcataaattgtaagatagtttccatcaccacaattaaacgcatacttttcttggtcatgcccaatgtcataaaaatgctaaactcttttcgtctttgtgacatcataaagtgatttgcatagaaaataaaaataaaagttaaaagcgccataaaaaaattagctatgataataaatggtactaggaagtcattcttctgttttatgtagctatttaacccaattgatacaagcgtatattcaatcatgaatagtacacttaccgctaaaatgaatggaatgattacaagtcgctgcgtaataaattgacgtcgtactatgtgccataacaatcttaacttcatatattgacacttcctccattcacaagtgctaagctatctgttattcgctgttgaaaaactaattgactttcttcaccacgatatatttcatgatatagacgcccatctttaataaaaatgactcgctctgcataagacgcatcgatatttgaatgagttaccattaaaattgtctgttccaattgatgaatctcttgaaataacttcatcaatgcttttgatgtttttgaatccagtgcacctgtaggttcatcggctagtaaaatcgtcggtttagtaactaatgcacgtgcaatggcaatacgttgcttctgaccccctgagatttcagaaggatatttgtttaagaatccctctaaatgtaattgtactgtcaactgatgtaccctttgttctatatcttttcgtttagcaccagctaaaattaatggcatcattatattttctttattcgtcattgttggtaaaagattaaaatcttgaaaaacaaaacctaccatttgttgacgatacaatgctttacttttatttttcatattatttaaatgtgcgccatccacaataatgtcaccttcagttaatccatcaaaagaagcaattaaatttagtagtgtagacttccctgacccagactcacccataattgcaacaaattcaccagctccaactgataaattcatttgattaagtgctgtcgtagcattcaaacctttaccataaaccttttttacatgtttcacttctagcaacatggcatgcacctcatttctttgttagttctatattaaaacaaaaaaatactaataacttttaaattagtgaaaaaatgttactagtatgcttacaatattgaaagtttttattcatctggaaattgaatcgtaaatgttgtaccctcattttgtttagatacgactgaaacaggatggtttgtgtgagttgaaatttgttttacgataaataaaccaatcccacttgagttactttgccgctggccattataacctgaatagcccttatcaaatattttaggcaagtccgcttcactaataccgataccattatcttttacgtataattgattgaattgctcatcaaattcaatccatatatctttacctctcgcatacttaagtgcattatttattaattgttctatcattaaagaggtccatctaacgtcagttaatacttcgtgatgacaaggttcataatggatttttgttttttgatcaataaactgtattgaatatttcataataattgggcgaatgatattgttaatcgaaattttagtgacagaaatatcagaagtttcatttaataactttaaataactaagtgctaaacttgtatagttatcaatttgaataacctcttgacgaacacgattcacaacattaggctcatctctttcaagtaacagttgtgctgcagtaatgggtgttttcatttgatgtacccatgttaaaaagtagctctctacatcatttttatattcaatttgttcatttttaagctgatacaacgcattttctaaattttcaatttgttgttgttggcttatagtttttacaaaacttaaatatttaatacctatgaatatgagtaataataataaaataacgccaagtgctagtaaatatgcttctaatggcaaatgatacaggtaaaacattaagccaaataaagcaaaaataactatgactattgctatttcctgagtaatacttttaagaaaggtcattgcattcaccctatactttatatccgacatttttctttgtaatgataaaatcattaacgccaatagtatttaattttttacacaggcgcgtcatgttaacagctaatgtgttatcatctatgaagttttctgattcccaacatttttcaattaaagcagttctacttacatatttatcttcattttgaaataataactttaatatttgtaattcagtcaaagatagctgtatgctttgttcttgatacacgacttttgcttcatctaatattaatgtacaacctttaaccgtcaatgaatcattagctactgacaagtcataagttcgtctcaataatgcttgaattttggcaatcgttaatgacaagttaaatggcttttcgataaaatcatctccccccatttgtattgccataatttggtccatattatcaatacgggaactaataaatataattggcacattagatgtttttcggatttcttgacaccaatgaaaaccatttaacgttggcaaattaatatctagcaatacaagctgaggttgatgttggttaaagatagacagtatatcatcaaattgttcaacgacaataacaccgtaattccattttttaagttcagatgctaaactttctgctataacaaaatcatcttcaacaattaatattttcatctataatcttcttccttcaattgaattatcctttgttatctttttgttctttagcctgctgcaatgacggctcttgatttgaactttccgtgtcatttgtattttgatttagtgtatttgctttttctttctcgagttgctttttcttcgtacgtttacgctcttctaaaatagacaacactataaagaatatgattaataatggagataacattactagtatcatttttccacctcaaattatatttaattctatattttcacacgcttctattctaacgctttctataacaaattgtcatatatattcattttttgttattctaaatcactctgtttacatatttttaactaaaactacataattgctcaaaattcctcttttacactgaagacatagtcatatactcaggaggatgtcttatgttatcagttaaaaaagccacaaaatttgcagttgctaaccttattatcgtgtcaacagtttttagctctgtcacacctgcaattgcgcaatccgataaaagttctaaagatgaaagtttcgcggttggtaatactaaaaatccaaaaaatgttatctttttagttggcgatggcatgggtccatcatttaacacagcttatcgttattataaaaatgatcctcatgctaaagaaatgacccctactgcttttgattcatatttaaaaggcacaaatcgtacatattcaaatgacccaaaacagaatattactgattctgcagctggcggaacagcctttagttctggtcataagacatataatggtgccatcggtgttgacagtaacaagcagaaagtaaagacggtgcttgaacgtgcaaaagaaaaaggtaagtcgactggtcttgtttcaacagctgaattaacagatgcaacaccagcagcatatgctgcacacgtgacttctagagatgataaaaacgaaatcgctaaacaattttataaagataaaatcaacggaaagcataaagttgatgttttattaggcggtggcgctaaatatttcggtaaaagtaatggcaatttagataaaaaattcaaaaaagatggttacgaccttgccacgaacagtaaggagttatcaaaatctgataaagataaagtgcttggtttgtttgcagataaaaatatgccacttgcaatagatgcttctaaagacgaaccatcattagctgatatgcaacaaagtgcacttagtaagcttgagcgtaataaaaaaggtttctttttaatggtcgaaggtgcttctatagataaatcagcgcattctaacgatattacaggagtcatgtctgaaatggaaggttttgaaaaagcattcgatgacgccattcaatatgctaagaaacataaagatacacttgtcgttgcaacagcagatcactctactggtggtctaacaattggtaaagataaaggatacgaatggaatcctcaaccgattaaatcgatgaaacactctgcatcatatatgacagaaaaaatggctaaaggtgaagaccctgaaaaagttattaatgaaggttatggctttgaattttcacaagatgatatgaaaaaagttaaaaaagagaataaaaagctaaaaagactacttaaaaaagaaaaagatgaaaaatctgcagatgtagaaaaacaaacaaaagccttacaacacgcaattcagaagccagtaaatgataaatcttatacaggatggacttccgatggacatacaggcgaagatgttaatacttacgcttatggacctagatcagaatcatttagtggtaatatcgaaaatacagaaagcgcaaaaataatatttgatatattcaagtaaagcataaaaattcccgagcactataacaagatgttcgggaattttttatggtttaatttagtactcaatgttaggtgcttggttaacacgttcttggtattttttaaatgcgaagtataaaccgccaactaatgttaaaataactgctaattttttcatcattcaaactcctttctaagatgtgttgaaactgagttcaattaaattatatgtttttattatacactttttgacatattttttaaatttaagaatgcgaagattttcaacatttctgatgctagctttctttttcatctttcaaatgcttaataaaatcaaagccaggtcgccctttagccaatgcttccatcacatcataccaatccgaaccgacttgttgatatatattttgcaataattcatcttgcgccttgttcaattcagcaatgagttgatcgcctttatccgtcgaatataattttttgacacgtcgatcagtctctaaaactttttcaataatgagaccttgctcttttaatttttgaagtgttgcatgtgatccttgtttagaaatttctaatatttctagtaatgatttaatagtaataccaggtaatttattgataaaaaacaaaaaacgatgatgctgacggctcataccatacttctctataatttcatcagcggtagtaataaacgttttatatgcaaaataaaacaacatatgctcataatcgtttttattggtcgacatgatgatgactcctttcaaagcgttaacctcattataataaaatttataatgtaagtcatacaaatgatgataaaactataagctaaatctaagtttcacgagaaacatttttgtgtatcagcaaattgcaccaatcatattaatacaaaattaatttaaacactcagaaatgttagtcgtgcgtaaatagtttgtatcactcactctgtgtatttaatgtaggcacatattttccaggaaataattaatcattcaccatccatgttatagcacgcttaatcgcttggtcccaatatgcataatcatgatctcctggtccatcttcaaattgataaggaacatttttgcgtgataaataatcgataaaatctaaattgtcttgatataaaaagtcttgtttaccacacataatgagcaattttggaatttgtttatcttcagctacagctttgtctagcaagtaatacggatcatgttcagttcctttaacacttgaaagattgccaattatggcctcttttgaaaaatcattccactctagatccattaaattttgcgcttcaaacacagcagataatggtacagctttggcaaatttatccccttgtgttaatgcaaatttaattgtgccatatcctcccatagagtgacctgctataaaattgtcatcacgttttttggaaagtggaaatatttgatgaacataatcatatacttccgaaatataatcataatagctatgaccatatgccatgttagcatatgcgctatgatccacattgggcataatcacagctaatttgtgttcattcgcatacctttctatgcttgtatatctcatatatgtcgtttcatcacttgataatccatgtaacaacattaaagtttttaatggtttagcagttgtatcgttattaaagaagctttgatcttccggtaaaatgactgtcaaattttgatgcataccaattgttggtgaatgatagtttaatgaaatataagccatacgtcatgacccctttctaattctactttatcaacattttacgcttaaacaattcactttaaaatcattttcaacaaaaaaaccgaatacaaatgtattcggcctaaaaaagtatttacgctttttctttatgatcttgcttgcgttttctaaacaatagtaatgatcctaataatgccaccattgcatcaaataaagttgcatttgtgttttcgctcttatctcctgtttctggtaaagcatcagtttggtgttgttttgatgccttattagaatggtttacttcacctttaggatttgatggtgctttttgttcattatttggtggtgtaactcttgaatcggagtcgctatctgagtccgaatcgctgtctgaatctgactcactgtctgaatctgactcactgtctgagtctgaatcgctgtctgagtctgaatcgctgtctgaatctgagtcactgtctgattctgagtcactgtctgattctgaatcgctatctgaatctgactcactgtctgattctgaatcgctatctgaatcggagtcactgtctgagtccgaatcgctgtctgaatccgagtcgctatctgaatccgagtcactgtctgaatccgaatcgctgtctgattctgaatcgctgtctgaatctgaatcgctatctgaatccgaatcgctgtctgaatctgagtcactatctgagtccgagtcactatctgaatccgagtcactatctgaatccgaatcgctgtctgaatctgactcactgtctgaacctgagtcactgtctgaatccgaatcgctatctgagtccgagtcgctatctgagtccgagtcactgtctgaatctgactcactgtctgagtttgagtcactatctgagtccgagtcactatctgagtccgagtcactgtctgagtccgaatcgctgtttgaatccgagtcgctatctgaatctgactcactgtctgagtccgaatcgctgtctgaatctgaatcgctatctgaatctgagtcactatctgagtccgagtcactgtctgaatctgactcactgtctgagtttgagtcactatctgagtctgagtcactatctgaatccgaatcgctatctgaacctgagtcgctgtctgagcctgagtcactatctgaatccgaatccggatctggttctggacttggctctggatctggcgttggttccggttctggctctggacttggctctggatccggcgttggctccggttctggctctgggtcaactggtggtcccggtgttggatcaactggatttactgctgaatcaccatcagcacttccgcctccataacgtacaacattctcattattccaaccgaaaatactgtagtctttacctgtcgctgggtcaatattttcttgaataacctgtgttttcaagtttttaccagtattatcatagtgaccttccactaatacaacatacgttttatttatatcaccaaaattaatacttgctacgttatcgtatttgtatgaaattttatctttaaactcaccagtcacttctttaaggttagagtcatttgggtctgcatagtagctatctgataatttagatgtatcattcacttcaaaaattctcagttttgtatctgtagcacttactttaccgctactttcttcgattttatcttggtaacctttaatatacacccacgtattacctaaaactcgttgcttagggttaacaaataccgtttgcttgtatgtgttttgacctgaagctgtatctacaccaataatttgagaagaaatgttcgcgccatttggcttatcaattcctgcaattggcgaactatagttataagtaattttattatcaaacatttcatccgcaatattaatatttgcatcatatgttcctgatttaggtgcctttgctcggtctgtaaataaaggtaatgaaaattgtccgttaatattttctttatcatttacataatctgtaaagacaaatgtatacgtcttagtcaagatatcatatgttgctttagctacaacatcgccattcgtacttttaatgtctgcaattggcatcgtattatttgaattagagtaatccacgtctccattaccagttacactatctggtaacttcgctgtaaaataatcccctgatttcacttgtccagtcactttaaaatttgccgccataaatgtgttaccactttggttagggtcaaatgcagtcttttctaacttgaaatcacttgccgtaactttatcatttacatttgtacctttagcatcagcagcatttactacaggttcagcaactgcaagactacgtacagctctcgttctaacacttggtttactagttccttgcgcattggaaatcgtttgtggtgatgattgtggtaaatctaatgtttgaggatttttaagctcactgtttgttgctatgttattagcatcattcgttgttttattatctacttgagaatttgcttcttgaggaacagtttgatcttgcatttttgcagcagttgcttgatctttaattgccgtcggttgaggtgtttcatttgttgaagctggctctgttgtagtggtattgctcgtttgtgtagacattgtttttgctgtgctatctacattcgcactgtttgtgtttgcactaatatcagatgtatcattagccgttgtatttaattgaggtgtttctatcgtattgtttttttcggaatctgcacttgcattatttttcgaagattgcgttgtatcgttcgattgttctgaagcttgtgcttgatgattgcctatcccaaatagtatagttgcccctactattactgatgtggtacctactgtaaaacgtctaatcgaatacttattctgcttattcgacaaataatcaattctttttttcaaaaatattactccatttcaatttctagattagtctaaattgtataatgaaataagaattatatcaattgcttttcgaaaaaaattacgtaaaatttgttttcttcctatttatataacttaaaattttctgttaactagcaaaaatcaatatactatttttacactattacaaatgttttacttttcaaaaacttagaagttctaaatttttcatcaccttaaattttactgtaatttcaacaatcaaatttaactaacatattaaattaatcatcatgctaacaaaaaaggcctaacgtataaatgtacgttagacctcatgttcaacttattcattttacattgtatattaaacacatacatcattgaataaatgtttgcttactaaccaatttttatgatctttaacaacaagtttttcatctttaagttcatgaataatatgaccagctgtttcccgggaaatcccagccatatcactcatgagttgaatagttaaaaactgtttgatttcataaaattcatcttgatcgtatcctactgtctgacatagatggcataacaatttgataattcgatctttagcaaatttacttgttaatgccatgttatagttcatgtgttgctgctcattatcatttattaatgcaaaaagtgtcaaaaatatatcatcattagctttgcacaaaaaggccatcaattctctaggcaatccaagaactgtacaatcggttaatgctgtgcacaattcgttaacctctttcggatgaaataagttactgattggaaataatacttgctctttattaaaataacgatatacatctccattttgattgtaatgttctctaataatgttaccttcaattaaaaagtaaatattgctactttcttgtggcgaaaaataaataacttggcctttcgtataatgtctgacaaaacattcactttgatatggttgtaatatactatatgggatattaatgtaatctgctaatgcctttagttcatgttctaatttattatttctacccaaaataaagttttctgtcataagttaaactccttcaaaccttgcaaagtgtcagcagacaactttttcatttgaatcaacggagaaacatatttaatgttttgtcgcgtgataaagtgctacatgtgaatgtgtgtacctttattaccaatcaaagcttcgtatgcctgctctaaattggtaatgataacttttttgttttccccactttcaacaaatcgtatcgcagcttctatttttggcaacatcgatccttccgcaaacttaccttgtgccgcgtattttttcagtgttgctacatcaatatcatcgatttgttgttgattaggttcattaaagttaataaatacattttctacattcgtaagaatcattaaggtatctgcttcaatcagcgttgctaatttctcactagcaaaatctttatctataaccgcttcaacaccttcataggtattttctttttttataactggaataccgccaccaccgcatgcaatgacaatatttttaccgtctgctaaagttcgaattaactggtgttctagtatagattgaggtagtggtgacgcaactacttttctataaccacgtcctgcatcttctttaaagactgagcctggctgttctttttgtaattcttcaacttcttctttcgtataaaaaggaccaattggtttagttgggttatcaaatcgtggatcatctttatctacttccacacgtgttacgattgtgcctacagttctatcactattcatttcagttaaaatgcgattgatttcagtttccaaccaatagcctatcataccttgtgacattgcaccacaagtatccaatggcattgccggcgttgtgtcactgttcgatttagcttgttggattaataaacctccaatttgtggaccattaccatgtgaaatgacaatacgcgctggtgaatcaaataaaggtttaaggttttgcatcgcacgtctaatagctgtttgttgtgcttcagctgttgcttcttttgtctgtatcgcattaccgcctaatgcaatgacaattttctctttcatatttttgtcgctccttttaaaaaacatttatcgttcccatcaataacttaattaacccgataactgcaagtacgataataatcataaaaagaatatagtctgatttaatcaaacgtgtctgattattcttttgaacgattgaataaacaagaagagctggaatataaagtaacatcgtcagtaataagtaattgatacctgctgcatatataagccatatagcataaattgaggctatgataccaatcgtccattgtttagtagttgcttgctgtcgatgctctaaagtgtatttaacttggtaaaatgcactgaacatgtaagggtataaaatagcacttgatgctagtgaaaatgcaaattgatacgcactctgtgtaaatagcatacttattaaaaataattgtactaatatattggtaataagcagtgcatttacaggtgctccatttttattttctttagcaaacctttttggaaataatccatcttttgcaacaatgaaaggtaattcaccagcaagcaatgtccatcctaaccatgcacctagtaccgaaataattaaaccaatatttacaagtgtagatccccaaccacctacaatagatgcaagcacctgtgccatacttggcgaatctaattgagaaatatgattttgcaaaatcacgccttgagctaatacagttaataagaaatagataattaaaactgatataagtcctataaccgtggcactacctacatcttttttatttttagctctgctagaaaaaattactgcaccttcgataccgataaacacccaaactgtcactagcatcgtacttttaacttggctcattgtgctcgcccaactaaatggcaatacaccctctgacgtcataccgaaaaagcctgttttaaaagtgtcaaaattgaatgcaattatcatgcatatgattacaagtaaaatcggtattaactttgcaacagtaacaatactattgataaaggctgctgtttcaacaccttttaaaattaggaaatgcacaccccagagtagtaacgaggcgacaataatacttggtaatgtgttgcctcctttaaaaatcgggaaaaagttaccaactgctgacatcaatagtgttgcataggcaacattgcctaaaaatgctgagaaccaatatccccaagcactgataaagcctacaaaatcgccaaatcctgcttgagcataactataaataccaccgtctagctccggccgttcattggttaaattttgaaatacgaacgctaatgaaatcattcctatagctgtaataatccaaccaataataatggctaatccaccggctttaccacccatatcagacattatattgaacgcaccgccaccaatcatggatcctataactagtccaattaaagaagatttactgagtttgttatctcctgattcgttcatattcatttctcctttaataccaatatgaggtgtctgtacttgatacttatatcatcagacacatcatattcatatcgttccatttagtgattaactccccaatgttgctgccattactgccttaattgtatgcattctattttcagcttgatcaaacacttttgaatgttcacttctaaagatttggtctgtaacttccatttcagctaatccatatttttcataaatttcttgtccataaagtgtatttgtatcatggaatgctggtaaacaatgtaagaatatcgttgaatctttacctgttaaatcaaacaactgttgattcacttgatagtcttttaataaattaatacgttgttcaaattcactttcttcacccatcgatacccaaacatctgtatatatagcatctgtattttcaactgcttctgcaatattatccgtaatcatgactgaaccaccatattgactcgctttttcttttgcaatatcaacatatgcatcttttggatttaatgatttaggtgtacaaattcttacattaacacctaacatagcacctgctaccattaatgaatgcgcaatattattacgtccatctccaacgtaagttaagtttattccttccagatatccaaaattctcttttattgtcataaaatcagctaacatttgtgtaggatgccaatcgtctgttaatccattccacaccggtacaccagagaacttcgctaaatcttcaacagcttgttgtgaaaaaccacggaattcaataccatcgaacattctacctaatactttcgcagtatcctctacagattcttttttgcctaattgaatatcatttttccctaaaaattctggatgcgcacctaaatcaatagacgcaactgtaaacgctgcacgcgttctcgtcgaattcttttcgaatagtagtgcaatattttttccagataagtagtgatgcttgataccatttttcttatactcttttaatgtaattgcaaaatcaataagtccttcgaattctgctttggtaaaatcactttcttttaataatgatctgccttttaaatcatacggtttttgaatttctgtcattattttcaccctcgcttctataatttattacgttaaatgtcttctctgaatagtggttgactcatacatctaggacccccacgtccacgtaccaactcgctaccagatatttcaatgacttttatacctttttgtctcaataaatcattcgatacatagtttctatcgtaagtcactacaacacctggtcttatacataatgtatttgagccatcattccattgctctctagcaccatcaatgacatcaccatttcctgttggaatgaattggatatcatctatacctagaacgtcttctaaagtatcttttaaatgactagattgtttgatggaaatatctttatttacgtcatcatattcaataataaatatattcatattgccttctgcctttaaaatggctgaatgtattgtaaatttgtcataatctatcattgtaaatactgtatctaagtgcataaatgttctactagttggaatttcaattgctactacttttttaaacgtcgcctgcggattttcaaaaatacgtcgcgctaacttttcaatagcttgtgcagatgtacgttctgaaacgcctatagccaagacttctttagataaaacaagttcatcgccgccttcaatattgaatgggcaatctcgatctaaccagattggaatattcgcatctttaaatctaggatgatgctttacaatatattgaataaatattgattctcgtcgtcgtgctctccagaacatccgattgattgttataccgtgtcctattgaggcttgtggatctctagtaaaataaaggtttggcattggatctaaatagaatggatacttatcatccatatactctactagatgtgtacatttcggattaatttcttccttacgtactcctgacattattttatctacaagttcttgattagaaagtgtcgcaaataatgccttaatttcttcttcatgacctaatattgtttttttagactctgctaatacatcatcaataaattcacttcttacttgaggattttcaatactttcagctgctaacttctcaaggtaaagtacttcaacaccctcttctcttagcacctgtgcaaaatggtcatgctctttttgagctacttctaaatatggaatatcatcaaatagtaatccatctaaataatcaggcactaaattttctaattcttttccaggacgcttaagtaacacagtttttaaagctccaatttcgctatttactttaattggaccatctgtcatgtctatttcctccttttatctttgaattcatttagagtatagacaatcttcaaacgcttacatgtgattatattcacataaagaaagtcgaaaatttcatatctttttgttatacaatacataataatggatttttatacataaataaaggtattttgggttaaaatatacatttttttattcaaaaacacccacaaaaacatgttgtataaagttttttatacagtcaaatgaatgactatgaattctttctttccataaaaaaacgcgtacacaagttaatatgtagtaactaacttgtgtacacgtgatacaaaacaaatttttattattcatttgatacatgtctatttaaataattttgcatatacgtattctgccatatcatttgatgcagttaagattaatgtagtgtcatttccactcaccgtacctaatatttcttcaatatttaattgatcgataaagtagttaatgccttgagcgaaacctggtgaggttttgactataatatatgcgccattgataatcgagctaagtacttcatgttcacaataatgtttaaacttttctctcatctcttgttctgtttgattattaatagctttataaatccatgtctcacaatcgatagggacacgatatatattaagttctttcaagtctttagcaattgttgttgcactatatcttacaccaaaatattcttcaatatatgaaatgatttgttcttttttataaatcttatgctttttaactattgtagaaacaatttctaatcgtttacttttcttcatattgtaaactcctttggtagttacgtttcttgtattaaaaaataaattcatgcatgtttcatttataatttaacactttgttttgcaaaagataataaaaatacatgtaaattttttgtgacaacttttaaaatgaattttgtattctaagtcagcatttaattatcacatatttactactagtaatgattttagactgccgagtagtctttcggcagacaaccctcatactcctctcatctaattacaaaaagagggtacacctacaaagtcaattatcaatgtaggtataacccttatataagctgtatttaaaatttaattatttataagtgtttaacattacttcttcttgtttatatatttttactcgacgccaacttcgttccatgcttcatatacttgttcagctgtttgctcgtcatataaatctttagccgcttggtataatgcatctttacaatctttgaagtttgaattacttgttaagtattccgttaatgctcggtagtaaatttgttctgatttagatttccctattgcttgaattacgttataagctgctttatttggaatgccagaattcgtatgcacaccaccgttatctttttcagtgtatacatagtctttcatatgagatggttgaccaaattgttctgggtttgacatgcttcgtaaagcatctccctcttttcctggtgtgtaaacatcttcacccatcaagaaatcctcatcatctacaaagtatccaaaaacatctgaaaagctttcatttaacgcaccagattgatctttatactctaaattcgccgtttcttgtgtcacgccatgtgttaactcatgtgctactacgtcatttgcacctgataaatttgtaaacgtgcggccatcgccatcaccataaatcattttgtctccaatccatgcagcgttatttctgttatcttgtccaccataatgatttacatgtgttaatgagactattggactaccatggttatcgtaagactcacgaccaaatgtatttttgtagtaatcatatgtttgtttagcataataattcgcatctacaccagcacgttgatcatctttgacgaagttttcatcttcattagtaattaatgtcgcttgacctgtttgatcgttaaaattgtatgctgataatttaccttgatgcgtcaaatcctctaaactaaatccaccattaatactattgatattgatatcttttgtatctccaagcacacctttacctgtgccagttgctgctgcttctttaactaagttcgttttttcaacaactgctcctgtgtctgcatcaattttaactttccaatgtgaaatttctggtgttactgtaattaattcaatattgtaaatgtatttattactgtcaccatcgatttcgactttattttctttgataacatcatcttggaggtttttagctttatttttatcaatcttaactgcgttaaatgctttgtcagccgcttcatccttgcttaatgtcactttatttgtcggctttactttcttcgcatcagtatcaccgttgattaaaacgactttacccgatttgtccgcatgcactttcacttctttgtcaggcgcatgcacaccatccacactcggttgtaacgtgtaatgcgtgaatcctttcttatctgtttttacatctgtaacagagtaatcttgataatgatttttcacattttcagatttaggtaactcttttaatgctttaactgcatcactcttttgcgtgatttcaaaattaatatctgaagttgctggtttgtgattcgtatcactcgctagtgctgcaggtgtcaaagagctcagcaacgttactgttgccatacttgtaaatgcatatcttgaaaatttcctcacatttcattcctcctgaaattttaaaaacagcttataaataaaatattaatttaatttttcagaaaagtaaacgattatttctatttatttctatactttttgttcgttgattttatttattgattcttttcttttttaaaaatgttatctgtgactaaataaaattttgaaaattgcacttaattatcttttaaaatttatcaaggctttatttttgtgaaattattaacaatcaaaaaattagtacaacacatacttaatcaacatgtgaaatatatatgctgactacttaactgcgcatgattaaatctatatatttcaatatcatggagacacgaaaactaccatcatataatcaaaaaagactagtatgtgacatcattcctcacatactagcccctatatttactttattatttactcgttttgtatggcgtatgtcccactgtaacttcaaccactctattatgatcaacaacaaaccaaatgcctaatgactttttagaatgttgataataaaaaataccgctatcagattctttcgttttattattctcttttttcaaatctttaccataagctttttgaatatcttttagtgatatattatttttaacgataaattgtaattgattcgcttcatttccttttgcagttacacctttaaaagtttgatcgtatttctctactttttttgtcgcatttgtcttcgctaatttaataccattaaatgtcacgttgtcatatttaatagcgttaataaaatgcttatccattataaaattagcgttatgaccgatatatccatgataagtatagtaaggtgttgttgccgcctgtgcttcttgatgtattggtgatgcagtccctacaactgttgcgccaattaaagtacctaatgctaatgtcgttgctgcacaaagtttagttgtttgattcatatttatctctcttttccatacaaatttttcaatcttattactattattataacttgcttgtacaataaaatactattgattatatttataaatatataacagttttgttatacttatttgaagtacataaaaaactgacacaaatattaatatcgtccgcatttcaagttttatagttaacatcattttatcgacattgaaagcatgatgccatgcaatgtatgactatttttattataaacggaggcgttacatttgaaaaaatttcttattactgttgttatcatcttgttaattggtgcacttggattcgctatttatgctgcaataaatcattctacatcatcaaatcataataatgagcaagataataaagctacccatcaaaagaaagatactgaagtaaatcatcaaaaagacgagaatacaaacaacacaaatgaaaatcaaaacaacaacaacggtgttactaatggcaatcaatcatctacgccatcaactgtccaaaataacggttcaacagcaccagcgaatacacaaccatctaatccgaatcaatcaaattcaaatcaatcaaattcaaatcagggcggtagcagtcaaccttcaacgaataaccaaaatcataaacaacagaatacaccggccccaaacaaatctaataatgctaatacaaacgagtcttctaagcaggcatcaccatcacaaccgcaatcatctaaaaattaatcatttacctgatacgtccacaagtatcaggtacataaattcagaaaaacagcaatgagatatttttctatttgaaatatcttactgctgttctttatttgcataattctcactttgttaaattcatataaaagttcgctttaatgtcattgacgtatgtataagctctcatgtttaataatattaatacacatttaaaaacgcttacacgaaaaatttagaaaggaggtacatgttaaatgcttgatagacacttaaaactactccagttttttattaaaaacccatcaaagcacattagttctaatgaaattgctgaacatgtcaatgtttcaaaccgcacagttcgcaatgatatccatgttatcaatagcaattttatggatgatatcatcgtaagtattaaatctaaaggatatcaattaaatacatcgcagtataccttagaaacgataactgaacgttacacgcatattcaatcatataaagaaaaactattattatctatggcgtatcaactgctaatgcacaataaatcacagacattgcaacaactagagcaagattatctattatctaaaactgtgctcaacgactatttcgttcgaattcaacaatggtgtcaaaaatttaatatcgctttaaaaattaagaaaaaacaaggtattgtggtcgatggaacagataatgatatcactaatgccatcatccatttaaatcaattatcatcagggcatgtacatgttgaagacctaattttaaatgaattacctgattcacaccaaaggatgatttcgcatattatacaagagacacttcaacaacatagtattgaaacaactgatattcaaatacaacagcttttaattcatctcattttaatcattaaacgtaagcaatctttaagtgagctagacacgttaaaccacgatgcaaaattgatatctcaatcttgcattaagcaaatcaacgaaagattaggttatgacttgaatgaaaaagtaatcaatatgttttcattctttattgcttatcattttaataaactcgatattggcatagaacgtatatttatacaaagttatattgatcgcttaatcgaattgatgcagcaacgtattcatgtacctttcaatgaagattcgattttacaacaaaatttatataatcattttagtaaagcatatttacgtatcactcaaaacatttatttaaacaatcctttagttatagagattaaaaaactttatccctttgtgttcaacacactttttgaagcgattgataaattagcaattgatactgatatagagatgagcgaagatgaaattgcctttttaacaattcattttcaagctgccatcgagcgtcgtaccaaaacacaattaaatgtagtcattgcttgttattatggtctaggtgtgtcgaattttttagaaactaaaataaataacttatccgaagagttgtcagtgataaatacgattaaactagaaaatataacacactatcactttgacaatgttgatttactaattacaactcacgatatcccaaagcaaactttacaaatgctccctaagcacctttcaactatcaaggttgcaccattattttctgaggatgaccgtcacaaaatcatacacgttgtgaagcaaaagcaaaatccggttcaagcacatcatcatatggacactgttaatttccttgtcgtaaatactgaacaaaaaccacgacatactgtgcaaatttttgaagaagctcaaaaaatattacaagcacatcatgcgattgtagaaggatatatcgaatcagctttagagcgtgagaaatcatcttctacatacataggtaattttatggcgattcctcatggagatcctgaaaaagttttacaatcacatgtgcttatttttcgcacaaaagatgtttttccatggcgacaacacgatgtcaaactcgtctttttcttagcaatttcacaaaaagacacagcttttacaaaacaaatgatgcaattaattgctaacttggatgatgattcagtgaaccatttatgtagtttagataatcatagtttaaagcaacagttatttgaatacttacaagaataattgccactagtaacggtaattattcttttttttagcatcaagaatacgcttacaatatggaaaaggagatgattttatgaaaattgtagctattacctcatgcccaaatggcattgcacatacatatatggctcaagaaaaacttgagcaggtagcaaaagaaatgggtgtggatattaaagtagagacacagggcggtgttggtgctgaaaatgttttaactacgcaagacatcgaagaagctgacggtgtcataattgcagctgataaacaagttgatctgtcccgatttgttggtaaacggttgattaatgaaaatgttcgcgaagggattcataatccgagaggtctaattcaacgtatcattaatcaagatgcgcctatttatcaatctgaaacaaattatcattcgaaagatcgcggtaagtctaaaagtggtattcaaatggtgtatcaacatttaatgaacggtgtatcgtttatggttccttttatcgtagttggtggactccttatcgccatcgcgctgactctaggcggtgaaacgacatcaaaaggattagtcataccggatgattcattttggaaatccattgaaaacattggtagtttagcctttaaatttatggtcccaatactagctggatatatcgctgttagtatcgctgacaagcccggtcttgttcctggtatgattggcggcgctatcgctgctgacggtagtttttatggcagtgatgcaggcgcaggatttttaggtggtattgttgctggtttcttagcaggttatatcgcaaagtggattaaagatattaaagttccaaaagcgatggcaccaattatgcctatcattattattcccattatttcatcggtcgttgtaggattgatatttatatttttaatcggtgcaccaatttctattatttttgaggcattaacaacctggttaaaaagtatgcaaggtgctaatattattatacttgcgatgataataggtgcgatgatcgccttcgatatgggcggtccagtaaacaaagtagcatttttatttggctcagcacttattgctgaaggtaattacgccgttatgggtatggtcgcagttgctgtatgtacaccaccaatcggtcttggtttagcaacgtttgttcaaaagtataaattcaatcattccgaaagagaaatgggtaaggcttccttcactatgggactatttggtattactgaaggtgctattcctttcgcagctcaagacccactacgcattatacctgctaacatgattggagcgatgattgcatcagtcattgcagccatcggtggtgttggagatagagtggcacatggaggtccaatagtggctgtattaggtggtattgatcatatattatggtttatctttgcagtgatagtaggtagtcttgtcacaatgattactgtactattattaaaacgtcgcacaccagttatagcagtagatgcaccagcgcaacatacgcaacttcatgatacagatataacacaacatgatacagaggttgacaatgtagataacaccgcgaaacattcacatctcaataaaccttctcatgtgtttgatcaacaaactatcattattgctgatcataacatgtctcgaaacgaagcaatcgatacgttgattcatcaacttaaagtgtgccgttatgtagagcacacatcgcatttaaaaaatgcaatcctagaacgtgaaatggagtctacgacagctattggcatgaacgtggccattccacatgcaaagtctgatgttgtaaaacaaccgattgtagctgttatgaaaaataatcatggtgttaaatgggaaagtctagatggtagtctacctcaattgattttcttaattgccgtaccaaacaacagtcaggatacacatttaaaaatacttcagcgcttatctaaagcgttaatgaatgatgagacgcgccaatcactaattaatgcaaacagtactacagaaatttataacttattaatgaaaatatagaggagttttaactatggcattatttttacaacccgtttttaaagacagaatttggggcggtcatgcattaaaagcatttaactatgatatccctaatgaaacaactggtgaatgctgggcaatttctgcacatccaaatggtcctaatacaattatcaatggtccatacaaggatatgaccctagatcaactttggtcacaacatcgtgaattattcgataatgattcacgagatagtttccctctgctaactaaagtattagatgccaatgataaattatctgttcaagttcatccggatgatgattacgctttaaaacacgaaggcgaactaggtaaaacagaatgttggtatattttagatgcagccccaggtgctgaaattatatatggcgtacatgcacataataaacaaacgttaaccgacatgattgataatcatgaatttgacagtcttttcaaacgtatacctgttaagtccggtgacttttattatgttcctgctggcactgtccatgccattggttcgggtattttaattttagagacacaacaatcatccgatacgacataccgtatttatgactatgatagacgagatcaaaatggtcaattgcgtgatttgcacttagagcaaagtaaagatgtgattgaattaggcaatcatgaaccaaatactactcctataacaactcacatcgacacacacactgtaactcaatttgtagataatcaatattttgcagtatataaatgggatattcatggagatttaaaattcaataaaccacatgcttattgcttagttacaattatcgatggtactggcactttagcagtaaacgataagcactatgacatccaaaaaggttctagctttattttaactacggaagatgaggatattcactttgtcggtaatattagtgctatagtaagtcatcctggataatagcaatgataacacccgtcccataaaagacagaaattactatctcttctgtctaaaaacataaaaatccacacattaaggagctataaccctaatgtgtggatttaatttttattctgtaacgttactttggtcaactttttcagatacgcgcttcatcaatggatctgttacaggttttaaaattaaacctacaacgaagaatcctatgccaaataacgttaatataattaattttgtaattaagatttccggaacaataccgcctactgtttcacgtaatgaatcaattgcatacgtaaatggtaagtatggcgaaatgttttggaaaaattgtggtgtcgtttgaattgggaatgtacctccaccacctgcaatttgtaatacaagcaatacgattgcaatggctttacctgggttaccaagtaatgatacgcacgtatatacgattgagttgaaaataatcgaacagaaaatcgttataagtacgaataatacaggtgactcaactcctgcttttaggattaacaaatctccaaccgatacaatgagtgcttgcaacataccaagcattataaagaatcctgctttacctaagaatacttgtcgtgtcgttaacactggctctaagctcttatgtttattatcaacagttaataggcttaccattaagagtgcgcctacccataccgataatgcagtatagaatggtgtcatccctgatccataatccttaactgggaaaacatcaacagtcttcttattaataggatttgcaataatacccgcttgctttttcaaatcattcttaagtgtgtcgattaatttatcgactgcatcgtctttgtctaacttcttgaaaatcttattcgcttttttcagatctttttcaacatctggcaatttattttgtgcaaaatcagctaaatctgataaagcctttttcgcttgtggctgatttttatttagtaatcctaccgcttgatcataaccatttaataacgttggtaaatttttattcacacttgcagtcgcattggttaaacgttgctccaactgtggtaaatcgttacgtacaaagttagctgctttcgctacatcacttttcactttcgggaagtttgcttgagcatttttaatagcactaatgtattgttgttcaatacttggtaatactgtttgtaaacgatcgatacgtgttttaccattttttaaaatagattgaccactgttgatgacttgatcaattgtatttagcttagactgaacattagacaatgccgtttgccctttgttcaattcatccataatacgttgtgatattgatactaaagagctgttaagatcttttttaacataatctctaaatgatgataatgatgaatctagttttgacagttgatctagtaatttagtagcttcagcagttcctgaactaccattctttaatgcattacttaattgattaactaaccttaatgattcattaattcgattattagctgtctttaccttatcaatttcttttgataaatcaacattttcattcttctcaatctcttttaatgtatcgataaattgttgattatattgagttgtgtattctaaaccggacttaacattatctaaagactctctaaaatcagatggcttgtccgatgctaaaatgccatacgaaatattacgtaatgcctgactatctttttgtgcggctttcgcttgggtatctaaattatttgataatgataataaagagcccgttaatgccgcttccattgatttaacatctttatctgtaatattttgtgtgttctcgttagctgtgctgacttgtgttgttgttatatctgcaaaactttgaccatcttttttcccgcttgtactttgtggtgtagtcgatacaggtgcattattactatttggtgcggtattttgcgtaacattattatttggtgtagtattgccatttggtgcacttggtggcgttgatgttacaccattaccagctgcaggtgcactatttgatgtttcgttgttcgccgcgctattttgaggaatctgttgctggtttcttcgattcaaatcttgcgcgcgtcgaattgcttcttgataatcaccgactctacttctaacttgtgtgacgaagcctttggcatcatttaactgtccattagcttgatcaataccttgactcgcaatgttaagtccttgattaattttagggaactgcgctggcacgtcatcagctgcaaaatttaacgctttttcaattttcggcatataattatttaaagctaatatcaacttagccttttcattaagttgcggaatagcaccattgacttcgtttaattttttctgagcatctaaaatatcacctttataatttcctagttttctaaaatcattcgcatatttatctaaatccgcttggtggttattcaaatatacaattttattcgcaaagtcattaatcttaggtaaagctttatctgccgaatataccgcattttttatcttattaattgtcggcacattttcttcaatagttaaacctgctttgttagcttcttctaataatgctcgagttactgttttattaaattgttcattcgctttttcaacgacaactgacgaaccagtatctgttagcttagacgcaacagcgttaatcttctgattcaccttaaattctacatctgctttttgaggctgcttacgtagtgtcccggtaatttcatgtgtaaacttagatgggatgtaaatacctgcaaaatatttacccatttttatctcatgatcagctttctctctacttacaaactgccaatcaaaacttttatttttcttgagtgtgttaaccatcgtattaccgacattaacttttttccctctgattgtgtcgcctttatcttcattaacgactgcgaccttgatgtgtcccgtgttgccatatggatcccacattgcccataagttaaaccaagcgtagaacgatggcaaaatagctaagcctgctaagataatccacacagctggcgtcttagctactttcttcagatccattttaaataatttaaatgcgttcttcattgtcacactcctatgtaggaattattcatattttttatatattttttgtaaattaatttatttttgcgttgtgaattagtataatcaatttactggaagatatttagtcgattgatacctatcaactattttcagcatacgataaattataacaaatcatagtttattatcacacttaattattatatttttcaagggagaatacgaaatatgcctaaaaataaaattttaatttatttgctatcaactacgctcgtattacctactttagtttcacctaccgcttatgctgacacacctcaaaaagatactacagctaagacaacatctcatgattccaaaaaatctactgatgatgaaacttctaaggatactacaagtaaagatattgataaagcagacaacaataatactagtaaccaagacaataacgacaaaaaagttaaaactatagacgacagcacttcagactctaacaatatcattgattttatttataagaatttaccacaaaccaatataaaccaattgctaaccaaaaataaatacgatgataattactcattaacaactttaatccaaaacttattcaatttaaattcggatatttctgattacgaacaacctcgtaatggtgaaaagtcaacaaatgattcgaataaaaacagtgataatagcatcaaaaatgatacggatacgcaatcatctaaacaagataaagcagacaatcaaaaagcacctaaatcaaacaatacaaaaccaagtacatctaataagcaaccaaattcgccaaagccaacacaaccaaatcaatcaaatagtcaaccagcaagtgacgataaagtaaatcaaaaatcttcatcgaaagataatcaatcaatgtcagattcggctttagattctattttggatcaatacagtgaagatgcaaagaaaacacaaaaagattacgcatctcaatctaaaaaagacaaaaatgaaaaatctaatacaaagaatccacagttaccaacacaagatgaattgaaacataaatctaaacctgctcaatcattcaataacgatgttaatcaaaaggatacacgtgcaacatcactattcgaaacagatcctagtatatctaacaatgatgatagtggacaatttaacgttgttgactcaaaagatacacgtcaatttgtcaaatcaattgctaaagatgcacaccgcattggtcaagataacgatatttatgcgtctgtcatgattgcccaagcaatcttagaatctgactcaggtcgtagtgctttagctaagtcaccaaaccataatttattcggtatcaaaggtgcttttgaagggaattctgttccttttaacacattagaagctgatggtaatcaattgtatagtattaatgctggattccgaaaatatccaagcacgaaagaatcactaaaagattactctgaccttattaaaaatggtattgatggcaatcgaacaatttataaaccaacatggaaatcggaagccgattcttataaagatgcaacatcacacttatctaaaacatatgctacagatccaaactatgctaagaaattaaacagtattattaaacactatcaattaactcagtttgacgatgaacgtatgccagatttagataaatatgaacgttctatcaaggattatgatgattcatcagatgaattcaaacctttccgcgaggtatctgataatatgccatatccacatggccaatgtacttggtacgtatataaccgtatgaaacaatttggtacatctatctcaggtgatttaggtgatgcacataattggaataatcgagctcaataccgtgattatcaagtaagtcatacaccaaaacgtcatgctgctgttgtatttgaggctggacaatttggtgcagatcaacattacggtcatgtagcatttgttgaaaaagttaacagtgatggttctatcgttatttcagaatccaatgttaaaggattaggtatcatttctcatagaactatcaatgcagctgccgctgaagaattatcatatattacaggtaaataaatattattaaacccgtaaaatttataagtataaacaaggagttcggacttaaacatatttctgttcataagtccgatttcttattcaattaaacccgaggcattcagttcgaacgcctcgggtcattttatataaatatattattttatgttctaatgttcctcaacatatccgtttcaattgccatctcacacattttataaatatgagcaaatgtacttattctcaaacattactgccgagctttaattgacgttatatttactataaactacttttccatgactctacggattcaatgtcacatgagcgtgataaaatttgttcaataataaagtcatgtttatcatctgatctatcaccaacagcatcttctaaaacagtaatataatagtctttatctacactttctaatgccgtgctcaatacagctccacttgtagagacacccgttaatactaaatgattaatatcatttgcacgtaaataaacttccaagtaactacctgtaaatgcgctaaagcgtcgcttagaaataatcggctcatcttctagtggtgctaagtcttcaagtattcgtgtagatgcatctgcttcagtaatcgcatatccttgagctttaattgttgaaaacactttattactcgaggagacatcattaaaatgcttatctaacactaaacgtatgaaaatgactggtattcgatgttgtcttgctgcttcaattgctctctgattcgctttaataatattctttattctaggtacactactcgctataccttcttgcatatccaaaactaatagcgccgtttttcgagacatcttcattctcctttacttgtgtagttctaagtcgttaaattcattataacgttaaaatgatggacaatctattcattgcattttgcatatacttcacaataatttaagggggaaataagacgtcttatatacttaaaaaatatatagatgcacttcccccaatataattatgctttatttttcaacttattgcgtcgtgataaccaaatcattagtacacccattgcaccaacaattacagatatcggcaaccaatgttcttttatcgtttcccccgctttaggcaaagatacattaccatcagcatttaataatccacttaacaatccattccctttaccaagtgttaacgtcttttctggctttggtgtgggtatatctggaatactgtctaataaatttgatccttgattcattaaatttgctaacttatttaaatctgtcgttttcccatttttattcaatcgatctagtaaacttggacgatttactattggtgataaaacatagtctatatcttttttcgtttgattgagtctcttttgtaaattcaataaatcatccgctttaccattcaatgccgatttaactaaattaaaaattttattttgatctgtttctattttagtaattaaatctgccagtaattttgccttttgtctttctatacgtgttgctaaaatcgtttcaattgcttgttttttatctttggcattattcaaaattgcttttaatatatcatctgaagacgtgtcgccagttgatgcaaaatgtttcttcaattggtcaacgatttggcgatttgataatcctttattcgtccaatctttagccaatttatctgcttcagcttttcctaatttcgtttgtaaaatttgagaaatcaatagcgacttatcttgtgattgatcaatcaatgacgttaataaatcatcactcgttgtcagagatagttgatcaatatgacgagtaatttgatctgcaatttgttgatctgttttaccatcaacacgtatatcttttagaattttatctgcctcgtctttattaaatatactttctaaaatgcgttgtgtagcatgctttttatcatcagtacgtgcaagttcttccaaaataatatttcgttgactttttatacgctctttcgtcttatttacttcgctcattaagtctgatttttgatttttaggaagttgcgtatttgcaatacgttgatctaaagattgtaatgtattcagtttatgatatgtgtaatgttgcgttgaggcattacttttagccaatttttcaatcatagcatgattaattttatcgcttccttgtaatttatcagtgagtcgattactatggctttgattctcttcatttgaaagaaatttatttaacacaacatgtccagaaccatcattatttggcgttttagctacttcatgattattatctgttgtagacactgctgaatcttccgatttgtgtatttgctgactcaaatggtctaagtcttctaacgccttatttaccattgcttcatcatttttatcatctttttctccatgttttgttgtagccgtttgtgacatatcatttttcattgcattaagatcgtcctcgccactttgttgacccctatcaacctttgaagaaacctcatttaaatctttaagcaattgatctaatttactgtctatatcactttgaccgttcatttcaatttgagaacctttattgtctttgctatccaactcattagctcgttttatgatttcatctatttgcgatgctgttttcgcttcatttagttgtgctttataatgtgctttagatgaagccgataactgttttaattgctcaatttgacgatttgctttgtcaactttgtctaataaatcttgcttagataatagctcttttgaaatttcagtatccttttcagatacagcttgggcatcatacggcaagatattcgttaaaatgatactagtcgccatcattgtcgaacacgataactttacatataattgaaacggtttccctcgatatttagccatcaatatactcctttctcacttacttccttaaaagaattacatactattatatacctgtttacaagaaatttacacttatctatctagttattgttgttagtaattatctacttattacttagcttatatttaagtaaacaaaacaagcatgacgtaatatcatattgtccatgtcgctaacatcatattacgtcaaatcttttatattaaatgatgttttattttagactgctttttctttttagctttcgaacgcctgtttaaaaacttgctcgaattgttcacgcgagatttcgtgtgcatgtgctttttgtgctaataaagcatctcgaaactgttgttgatctttcaaactttctaacatttgtattaattggtctttactttccattgttatctcatcattatgctcaaataagtgctctgatagtgttactttagcatggtgtgctgtttgacgataacctaaaatcaacaactcatagtcaaacgcttgttccaccgcatttaaaatttcattaccctcattaatatcaagataaatatcacataactggtatagttcatttaccctgtctatattaatagatgggtataagtgcacattagcatattgatcaagttgcattagcttatcagacatctctgtaatagcagcgatgtgaaacttaaaatctggtaaagtttcaaccaataccttgatgttacgaagttgatccgagttagttaatattacaatttctttagtatatctattacgactacgataattatatagatatccgccttgtaaaatacgagatttaacctttgcgtctgctatattgagcatcgtttcatattcgtttttatctggaataataatattacaatgtcgtttcatatcacctttacacatcaattgcatatttcccgggacattaccatcgcactgttcttgccataccaaaacatcactaccatttgatggcaaattatataacactgaaaatggtagggctagtgagttaataacgaaatgatgttccgtaatttcaagttgcttgataaaaaataatacgaatgcgagctttgaagggaaaaagtaagactttccttgccaatccaatatgacatcagatgttacaaaattttcataaatcacttctttaccttctgctgtcatatatttcttcaagatcgctttacgatttaaatcgtaaacagtttgtgcaaatttaataccattcttagaataataatcgacaaatcggacacgttgttggtcatcaaaccattcgacacgactaacaattctagggcgctctccactttgataaaatattttgcctcgtagacgtcccatatcattaattgtagccgaattgttgttacctttaatttcccaaaaagctggtacagtaacctgattaaaaaatcgtggtttcatattttctgtattatgattatctgcaaaaaattgatacggtgatataacatcgtccggtaaaaaaccattgtcattgagtacaattgttaaatcttcctccaacttactggctttaaaagactcatataactttcgtgaatgaccgttaaagtaatcaaataatttaatcatgcagcacctcttgaactaatgtttcccattttaaaataatatcttgagtcataaattgctgtgccacttcataagagatgtaatgtggtgtctggggtccattgttaaaatacattacaatggcatgagctagttttgcgacaacatcatccacactatcttcatcggtatcaaaaggtaccaagtagccattttccccatctcgaataaaggttgggttaccataattcacatttaatccaatcatacctagtcctgagcctaccgcttccattagtgttaatccaaaaccttcgctagttgatgcagaaagaaataactcataatcagtataaatttcatcaagtttaacatgacctagtaaacgaatataatcttgcgcgcggtgtgtatcaataattttacgcagtcgcgtcttctcactaccttctccataaatatcaaatgttaattctggcacttgtcgtttagccacgataactgctttgacaagccaatcaatatgtttctcatttgctaaacgagatgcactaatcatcgcgtatggctttcttgataatgttggatatgataatgcatcaatgcttcccaccggaatagtataaacacgtgggcgataaccttgatattgctcaaattgtcgacaaaccatatgattttgaatatctgtcgctgtaataaagaaatcaatgtatttagcttttgaaaattgatattcataataattgttccatagtatatgctgctcgctcatcatattattactataatgatcagcatgaatcacaacaccaactttactatcacctttatgctgcaaaacagcctgaccaatatcagaagcgcggtctaatatgacaatatcgtctcgggttaaattcaatcgttgtaaaaagtatgcaataaattccgttttgttatacaacaccgcatcttcaaacacatatatagagctgtctccatcaatatattcgttataagtgatggagccattttcattatagaattgtcgcatatataatttcgctttattatcagctggtgcataatactcagaaaatatgcgtgtataactataaaaatctttacgtactaacatactattaattacaaattctgcacgatccacaatgtctttttgttcattttgcagataacatgttacaaatgatgatttcccattaaaatataggcggactatcttaccatttctttctctaaaactaatatcatgaccaagctcacgttcaatgtcatctaacgtgtacgttgttggtgctatagaaatatcactaaaatactgatacaaccaaataacttcttgatcttcaaacccaatgttttgcgttaatgtctgtatgttctctgactgtataaaatctaaaaacacaaatttagtgtcttgatttgtgcgtctcaataatttagcacggtaagcttgtgcatattcaacaccgctactcgcccagcctataccaaagtttatattatatattgtcatgcgctaccccttttcgtttatggaaaatgtataactggcataccttctttatcaaatgtaatcatgctttgacaaatatttttcaccattctttttttgatatttcgtgtcataacttcaaatgaatctaatgcaactctatggtattcaaaaatagcgttacgttgcccattttgtcgttgattaacgtttgcttttaattgttgtaaatagtcgacttgttctaaccaacatgaatcaattgcttttaaaaagactttttgaacgaaaatattataataatatgcactttgcatgtttttacgattcaaagctatttgcttttcaaattgctctaataaaaatgttactacagcttgcttatctttaaaattaacacaagccacatctttattaaattggaaacttaaattttgataaatatactcgacaacacgcgattttgttagcaccttttcctcatttacaaacatttcaaacacatctttagctaacactttaaaatctcgattctcagcatcatctatttctaaaactcgattgcgttcctcgtatacaagatctcgctgtatactaatgcttttttcaaattcattagccatttcacgagctttaaccccttgttcttccgagatacgctgcgctttaactacaatttgcttaactttgcgattaaacaaactactttgcgataatcgttgtgcatctaatgaatataattgattattttccgctaaattactatcgctccatcgcttaactaaataatcatctagtgaaatatatatacaagatgatcctggatccccttgtctaccagaacgaccacgtaattgcctgtctacacggctattttccatatgttcatgaataataacagctaatccacctaatgcttcgacaccttcaccaagtttaatatctgtgcctcgacctgccatactagtcgcaacagtcatggaaccaatttgccctgcttcagctatcatctgcgcttcttttgcaacattttgcgcaatgagtaaattattaggaatatccatttggaaaaatacttttgaaaagtattcagccgcttcagcagttctcgttatgagtaaaaccggtcgccccgtttcatgaagttcaactatatcatgaatcattgcgatgtttttctcatcaactgaacgaaacactttatctggttcatcgatacgttgaatcgctttatcagttggtacttgtacgactatttttgaatacaaatcaaagaactctgattcgcctaattttcctgtagctgtcatacctgaaaatgattcaaaaagtttaaataaattctgaaaggtaattgttgccataacacttttatctgttgaaacctccataccttctttcgcttcaatagcttggtggagtccagcttgcaacttagttcccggtaacatacgacctgtaatacggtcaattaaaacaatatcaccattatatacgaaataatcgacattagattcaaacaaatattgcgcgcgcagtgctagattaatattacgcactaagaccatcgcttgttcgctatataaatcttcaacattaaagtatgattgtgccgcttcaataccttgatttaacagccatatttcttttttggtcttcttcattttaaaatgcacgtcttcaatcaatgtatctacaaactctttcacaatatgaaatagatttgattgtaatcttggtgcgcccgaaataactaatggtgtttgcgcagcatctaaaatgattgaatccacttcatcaataataccgtaatttaattgtggtaaaaatttcccttccgcactatctgccaaattatcaattaaataatcaaaaccgagacgtccattagttgtatatataatatcatgttcatatatattacgtttttcccctttttgatactcataatccacaatatcaacaaaacctaatgaagcagttaaacctaaccattcatataatggttgcatctcttcaaaatcacgcttcgctaaataatcattcgttgtaattaaatatgttccttttcccgaaagtgcatttaaatataaaggcatcgttgctgttaatgttttaccttcgcctgtttgcatctccgcaatgttaccttcatgcaatacaatcgctccgattaactgaacttctttaggatacatacctaatactctccagctcgcttcacgtgccactgcataagcttcaggtaacaatgtgtctagtgtatcaactcctgatgctatacgttctttaaattctagtgtcttttgttttaacacatcatcagaatatgatttaacttcatcgctccatgtattgatgcgtttcactatttttctaatcgactttagtcttaattcgtttatcgtaacatctagtttatgtttcatttacttccccaccattcagtttcgatacatctaagtaatctaaaaatcgtactggattcattaaacgtgacatataatttagatggttgtcttgctcttctttaaaataaacctcgacatttgtatcttttagttcatgatttcctgggacatgttctgtaaaccattcttttaaatcatcatcttcatggcttgtacgatacactttgcaatccaaatgctgagcgacataagttgcaaaaacatttgactttgacccataactaatcaaattaattgcctttagggtatcttgactttgcaaatcattctttagttgcttaatatttccctcgatattgtcgtccatccaacgttcaacgagccaaacatgaccaaacgatttcaaaaaatcattcgaaatagttggataggcgtcagatggttctgcaataatgacattgatcctatcatttccatattggtcatcgcctatcttcgtcacccgcatgcttttatattctaaattatcttgatgcgtcatctctgtaattgttaaacatctaaatataagactcgtcgatgctgcattcatcatttttattttataagcataggcttcatcaggatattgaatcgtaatactatttgactttacaatctcagtacttagttttgtgccatttttattataaaaaatgatgataaaatacactgaaccagcaggcgttgcatcaaaatcaaaatgcaatttataatgctgtcctctacgcaaaattggtaaacttggtgcacttttatattttgaaaattgttttaacatcaaccactcatgaatcggtaatccagagggcatcaaaggatttataaaagttacttcaccatttgaaaatgatacttttgagccatacataaatgtagtttgtgaaatataattccaagtaactttaaatgttttgtttttcagcatgttgaactctcccaaacttgtcttccaaaataatgttgtaaaaattaacaaaccaacttgcaatggtaggtgaatcatcattatgtcgcccaggaatactgcgattcatcactcttgcttggtgtgctgtcaatacaggtagtagctcttgaaatgcatgtggatcataatcatcatgttgcatatatgctatggcaaaaacagtttgtgacaatgatttcttttgaaatgtttgccaaaatttttgatttaatgcctgtatcgacgcttgagatgtatcaccttcattagacaccaggacgtctaatgctgtaccgaactcttctggtctaagtaatcgcatatgttcagcaatcgttccaatattaacaagtggtttaccaacaataattgcctgaggatttaactgagcaccataatacaaggcaccaaatgaccccatagataaaccagataatattaattcatgtgatttaaaattcagcttttctaatgtctcttcaataacattgataataccttgttcatattcagatgaaccgatataaaagctaccaccttcaacacgaggatcgccgattagtaaaaagggtgcattcatacgtttcatcatataatatccttcgaaaccttccgctgttcgataaccactaaaatatacgtttagtggtggtttcatatcaccagggtggaaataataaataaattcctgtcgttgactatctacaaaacgactaccaccgagtaaaaattgacccatgtctaatctagaccatcgtttgtgtataggtcctaaatgtaccgtcccgttccctcgcgccttaacagttacacttatataagcatcaaatggtttcgtaggtatctctaaaggactgtctaacatatcatcagtcaatatgatttgttcaattaatgcaccatcagcgccagtttgaatcaatctaaatgtatattgcaactcgaccgcaccatcaatatcaaattctggccatatttgaatgactttatctttatcgtaaacgagattattttgccaagatgcgataggtttaaattcttttccaaattctccactcaacgtgagctctgaattaccttggtaaacgacatctcctttaaaattcggatgaacaagtgctaacttaggagaaaccttatctccatactgtcctgagaagctaactgcctctaatttattattacgttcttcaatgttccggtaatgtaatggttgaacaacgtatttttggacattttcgtcttgttcatattcaacagaccaaaatgattcatcaacatacgtattgtatggttcgcttatcatttgtaataaattcgttaatgtctccgagtatggtgcttgaatatagataaaatcaaagcgtccttctgcttcaacaatcgcttcaatagcctctacataaccactatcaaattcaaacaatccaatatcgaagtaatcccaactcacaccttttttgtgttggaaaataggttctaaatcgtctcctccaatttgcaaaactctaaatttacgtggcatcattttcaccttctattaactcatcgagctgattaataatattcttagaagcatatgcatctattaattttaaagaataggcgtacgcataattccaatttttcaaataaaataaataataatttaacgcatcatctaattcatcaactgtatttataatacggccattgtcataatcagagacgtaatctgtttgttgaccattaatttgtggaatcccagcgctaattgcactaatttgtaaatacaaatcaggttcttttgacatatctatcacaagtcgcaacgtccgcaatgcttctacaacatcatgttcagcatgtatcgtcttaacagcaatgatgtcatcttgatcttcaggtgtcattaatgctgaaacattaacatcggcattctgtttagcttggtattcctcatttaccgacgtaatacattcacgaagccacatcggtatatcattttgatggcgcgttaataaaattaaacggtaattatcttcttgtgcgatataatccacaagtcgttgcatcatttgttgcaaatcaacgtcactcataccgtctatccatacacctataaatgtttccatcaattgactacttatattaggtgattgtctcgtttcaaatggcgtgattcgaatcattgtattctctcgctgatacttctcttgatgactaattaaatcacgttctagttgcacactatcaacaattaaatgggcattctttacgatagattgatattcctcatccgacacagtttcatttctatttttaaaaaatgaataacttaatgatttcgccggaatatgattggctatttgtcgattgtgcctagcatctgaagccacaatcacatgatcatcttcatgtatttgatgtgcaatcattgcttgaaatttttcttcaattagttgagccatattgttatattctgtttgttgatagtgatgttgatatctttttgaaacagtgactctgccatttttcaaatcttcatgaagtacacaatctccattaatcgttaaatattcttggtaagaagcctctccctgatcatcaaaataacgtatagctgataaataacctctgtcatcaaaaatataacgccgttgtaactgatctctttcaaattcttcaaaccaaattgaatacccttcttgactaaaataaatatttgtataggtctgttcactcgtcacacattttaataaatacggcgtgtacacaaactcaacatcatccggccattttaagtgatgataattaatcgcttgtggcgcatggtgactgaatccttgaatttcatcaaacacagaccaatactttgtctcatataagtcatatcgatgtaaaaatgttcttaaatttggtgcatgattgagaacaatcagacgataatctaagtcattttcaaggtgcatccccatcaaactaatcatatcgtcaaattccgtcttattttgtagttgataatacggcacagtcgtgtcttgccaccatcgttggtcatcgtaccaagctggaataaagtatttcataattacctccttaccaatactggtttaaaaatggcttatatttatcaaaatataaatatgtacgaattgtttctgcaatattaatactgatgtaaactaatacaatcagttgtactgagaaataaatttcagtagataaatgcggtacaaacaatgtgaaataaagtggtataccaataatgactgtaactaatgccgatccaaaccaacatacgcgtcgtgcttgataatttaaataacgttctgtatccttaccaggtttaactcctgaaaaataattgccactctttaagaaatctttggatttttgtttagtattgattaaaaatctcgataaaaaataacccaataacatttgaatcactaaatacaccgaaataccaattggactatcaaatgtcatcattggcatatcatctgaaacgtctttattaaacatagataaaataaaatgaataccacttttcaagaaaacaaatgctgaaatactcatcattaaagtaatactgcctgcagggttaactttccaagataaataagatctcatatttgttgcggaaacgttcattaaatcgatatatggtattctcacttctactaattcaatgaataataagataaacaatgtgattatcacaagagtgattaacaacgcaatcacaatatgacttgcatctatatattccattttttgatgcatcattgatttaataatgctaaccattacaatcggcattggtcctgcgatgccgtaacgactatttttgtcagctaaccaaactaataacatcgttccagtaaccaaaatcaagattgttaagtaaatattgtcttgatgaacacgttctttcgaaacatattcatgaatcacaaaataactttgaataacacttaaaattaatgttaagatgcgctctttataatgcttctcaagacttgtttgtttcatgtatttatccatattccgataagaaatcagcatcaagataatcattgatgttaaccacggacctaatcctaaagtgaaaatgtttaaagtattaacgtctccacccatattagaaatagctattttaaaaaatgactcatgttttacttgcatatcgttataggaaacgatggaaatgtttgtacctaatatataaataaacaagataaaacatgtgtaaagtatacgtttatatataattttatattcgtattgttgtaaaagttttaacatgttgcacctcttttatatcaaaaacattaaaaagactaaggttatttcactaattattaaaatctgatatagattttttagtgaacaacgccccagtctttttaattttagccaactataaattcaatttatgcttgagaatcatcttgatcattttcatctttctttttctttctcttcattaaacctaaaccaactaataatgtcataacgccacctagtaatccattttgttttattgagtcacctgtatctggcaatcttttttcactttgtgctggcgtgccattatgtttagtcacttcagatgttgcacttaatgtagactgagattcactcgtgctcgttgttgcttcacttgatgagcgagatgtgctcgtgctgtgtgtatgatgcatactcattgagtctgacggatgcattgagttagattcagatgtacttgttgagccggacatacttgttgatgttgagttgctcattgaagtcgagttagacatacttgttgatgttgagtcagaaatgctttgtgaaccagacatagatgtactcagcgattcggatgtgcttgtcgaatcggatgtgctcaatgacattgatgtgcttgttgacactgattctgagtcgctaattgatgttgaatcggattcacttgtactttctgatgttgagccagattctgatgtactttccgatactgactcacttgtaatagtcgacattcggtttgatgttgatgtgctttgtgaattacttaatgatgctgatgtgctttgtgaatcggattcactgctttgcattgacgctgacgttgaatcacttaatgatgttgacgacgaatcggattcacttgcgcttgctgatgtactaattgccttcgatgtgctttctgatgttgagttgcttgtacttgttgagtcactgagcgatgttgatgtactttctgatgttgagtcacttgcacttgttgatatactttgtgaatcagattcactctctgaagcacttaatgatgctgatgtgcttgttgaacctgattggctcgtacttctagacatacttgttgaatcgcttagtgacgttgatgtcgatgtggattcactttggcttgttgactgacttgtatatgatgatgtgctttgtgaatcggattcgctcgtgcttgtacttgttgaggttgaggcactttggcttgctgagtttgagtctacaccgctttgattcattgaggcactcagtgacaatgatgtactagttgagtcagacaaactttctgatgttgacacacttgtacttcctgatattgattgggacatgctcaggctcattgatgttgaatcggatttactttcacttgatgatgttgagccggattcactctcactcgttgaaacgcttaatgatgtcgatgtacttaatgactctgattttcttgtactgattgaatcacttgtcgacattgatgcacttagtgaattagacttgctaccacttgctgaatcacttaatgatgttgacaaacttgtagagtcagacaaacttgtactcgttgatgtgctcaatgatgttgaaacgctatcgctcttatacgctgatgttgatgcgctaccacttattgacgttgaaatagatgtactgctacttgttgaattgcttaatgatgttgatgtgctaccagattcagaattactatctgataaagacgtactatcgcttgtggagccacttaatgactctgatgttgattcggatgtgctttcactcaatgattcacttaaaaaagcagatgcacttttcgactctgaatcacttgtactatttgattcacttaatgatatagacgtactctctgaaccagatatcgcttcactgatagaatcgctcgtcgacgttgagtcgctcgttgaatcagactctgatgtacttaagcttgtggaatcgctcatagatgttgatgtacgttctgaattacttgtacttaacgatgtcgaagtactcaccgaaccagatgtacttgttgagacactttgtgatattgattcactcgatgcagttgatgctgatttgctatcacttgttgaatcactaaacgacgttgatatgcttgttgaatcgaattgacttgcactcattgaaccagacgtactttgtgattccgacgtacgtactgaactacttgttgatgttgatgtgcttgttgaacctgattgacttgtactcaatgataatgacttactgtcagaatccgatgtacttatcgaatcacttaatgattctgatgtactacctgactgagacgtgctcatcgaactacttacggacattgatttactgtctgatgcagctaatgatccacttgtactcatagaatcgcttatcatttcagacgtgctcattgagtctgatgagcttgttgagacactttgtgatgttgctatgcttagtgatccagatactgaatcacttgtgctcgttgaatcgctcaatgattctgatgtactcatcgattttgaatcacttgtacttaatgatattgatgtactttgtgaatctgatttgcttgttgacgcactttgagagttggctatactatttgaaatactgatagagtccgaggtgctagctgactcgctcaatgattctgatgtactaattgaatttgatgtactatcacttaccgattgtgatgtactagccgaatcagatgtacttgttgataagctttgtgacttagacaagcttcctgatgtactcatgcttactgaatcacttaacgatgttgatgtgcgcaatgaatcagatgtgcttgttgatagactttcggatttttcagtactgctagagttcgaaatagaatcgcttaatgatgttgatttactaactgaacctgacatgcttgatgatacactttgtgaattcactaaacttgtgcttgttgagcttgatacactattactttcagatgtgcttaatgacttagatgcactcacagaatcagataggcttacacttgtcgatttcgaggtactagctgaagtagataccacaatcgatcctgatgtgctcgttgatgcactttgtgagtcagctttacttgttgacacactttgggattgttgtgtacttcctgatgttgatacggaatcactcatgctatttcttgttacttcatatttaaaagttgtcgtcgttttgttaccgctcgcatctgtagaaacgattgttatagtacttgtaccaatgtttgttggtgtaccactaatagtattatttgtgctatcgaatgttaatccagacggcaatcctgtgactgtatttgttactgcattcccactattatcttgcgtagcaattttaatcggggatattggtgaatacacttctgatgattgatctcctattggtgtcactgttggtgctgtcgtatccacaacatttattgtaaaagttgtcgtcgatttgttatttgcttggtcagtagatactactgtcactgttgattgaccaatttttgttggtgttccaatgattgaattcgttgcactatcataacttaatccgcttggtaatcctgtaactgtatttgtcacagtcccagtaccattatccgttgtagtcaacacaataggattcattgttttacccacttcaatggtttgattgcctacagttacagttggtgcttttacatcagtaaaataatatgtcactgattgtccagcattcgtcatttttacagttttatttgtatcattataagttgacgcatatgaactatcgacagatgtgtagttatatcctttagcagtcaatgcagattgctgattatcgattgtcacgacttgatcaacatttcctgaatatgtttttgggggaataatatctttacctgttgttacatcaacgtatctcacttgtgtaacagcagattctgtatattcgaatgttccaaattgtacttgttgtaaatttgtcgcgccacctgttgaggctgtcattgataacgaaaagttggtcgtaccactttttgcaatccaatctgaaatattacgtgtccatgtttgacctgcatacgttacagtcataacttttgtatcaccattataattaatatcaaaatcttggaacgtgttattcgtaggttgaacttttaactttgcagcattatcagctgctgaacttgatgtgtacgttgtcgcaacgccataactatctgttgtaacaaaggcaccaaacgcaccaccaccagctacattagatgggtctgcattcgcttttgctgctgcattcggtttagatgtattgtggtacgtatccaatttgaagccaaacgcattactcaaaccaccgatacctactgccgcaccatttaatcctgtttctcccaatacaccaggtgaaaaggcaaagccgataccatctccaccatttccattaccttcgtatttattacctaaatttacttttccagaaaaatgaaaacttttattagagtcaatacgtgttcctaatgtaatagcacctttttggctgtatgcatcctgcgttaacgtcacaataccggtactttgatcataagtagcattacctgacgttgtcatatattgtttgaggttatctttattaaccgtaatcgtattagcggttactgcacttgtcgttgcagctgatgcaaaagttgacatagctaatcgactgaaagttcgaagtttgataggtgctgtgctggttgacgttgtactagttttgtttaaattggctgaagctggcgttgtgctttgtgaagtagtatttgatgcagtactttgatttgttgatgtattagtttgttggtctgtacttgaaattgatgttacagatttagtatcagaacttgatgtagtattctttggggatgttgattcagatgtagatgtcaatttttcttgttgattgcttgtactattagttgtcgaagtgacattttcagacttttcacttgagactgtgtcactatttgatgtttgttccgaactgctatttttcgttacgctagtagaatcggttgttgatgttgatgcttcgattgtcgttgagttttgattgcctacggtttcactttgcgtgtttaattcagatgttaaaggtgcatcagaagccgcaaaagcttgctggtcatgcaacatgtttactgtgaatgcaccaccaataaccgctgtagttttcagtccgtatcccgttatttttttactaatgctttgattatcttgactcactaaactatgactaataaatggtagtcccataattttgaacatttcaatttctttaattccggattttacccaattttttccagatttataaagtcttactcttgtcttttcatttgctaagctgtcatgaaattctttctgtcttttactcatgtaataactccttgtattatctttacattcattagattataatatatgccactattcaatttaatacaactcttttttcaaataaaaaatacttaatttgtcaaaatccattttttctcaaaagtatattctttgatgaaatcgctttctttattgtgtgggatttagtataatattttaactatattctgaataacatgccttattatgtttatataattttgaaatcaatgtttatcaatttagataacttttacttatttagtaaaaatgtctttttattaaaatgtatttatcatccaccttttattcattaatagtcaatttacaactaaaagataaatattatatttatattacatctttaatattaaagtaatatcaatatattttcaataaacctagtgttatatatctgaatttctaaaaaattcttctttgaaattataaatatagcgacatatcgcttcccggttttgaaatataaaaatacatcgaaactaatttcaatgtgtagtttcgatgtattgaaaatgattgaattcactattccttgttatctgattgattatcaaaatttcttccttctaaacctgcaagctcttctttagaagctgatggtgctttcatttcaaatatttcattcacaaccgtgtaatcataatatcctaacctagcaataggtttaatcgacttaatgtctaatttaccattatcaagaatgaacttatcgtcaatatgaacctgagcaactcttcctataacaatatcaacggttgatacagtgtctcctgtcggaatacgaatcgtttgaacgtactcacattcaaaatgtactggcgattctttgactcgataacctggtgcttctatacatgcttctttcgtcacacctgcatattcaaattcatcctcttcaggtggtagtgccttcgacgataaattaacagcttctcttaaatcatacgtggccatgttccatacaaaccaccctgtctcttctgcattttttactgtatctttacgctcatgatcaccaagaacagattgatttgctgcgaacataaccataggcggatcccatgttaagttttgatactgactataaggtgctaaattatctttcccatctttcgatacagtagagatccaccctattggacgtggtactgtactacttttaaatggatcgtgtggtaagccatgactacttacaccttgcttcggcgaataattcattctatcctcaccccttattagtaattacatttaaggttacgctctcatgacataagcgtctaatataaataatcaatttatttataagaagaaactatatatgacgtggttgcttataatttgtgttcttgattcgaaaattttagataaggatttatgcaattaatatttaatgatgttttttgttaatttaattaatattagttaatataatcaagattagcttataataatattgaataacattattttagtttttgtataatttgcctatcaactgaaaaacagctaatacaaaggagctaatgaagatatgagaaaaattatgcgaatcttattatgcacatcaatcataataagcggttgctctttcatatcaaagaaccaaacaaaagatattccaaagacggttagcgtcaaaaattatgatggtaaatatattggtgaacataaaaaaagaaatgaagtatttctgaaaaaacataaaggtgaagcgataaaaaaatataaagactatgtgaaagatacatttggttatgattgtaaaattaatttagttgaggcctatactaataaatctggatttagcgaaaaagtaaggtagatggtttagtagtcgtcggtactgtcaattatgacgttccctttcaatttagactgatatttgttgagtctggaaatggcatagctatcacaacatttacacctggtcatataaatgaaacatcagcggcagttgcagccatgatgtataagcgttatgaacctgaaattgaacaagctcgattaaaattcaaatcagaagttgagaaaaacggttattatgccatgaatgaaaaacttcaaaagaaacaagaattcaatggtgttactaaacaatttttgaatttcaacacagacagtatcgatgatttggataagttcaaaaaagaattcaaacctgttatgcacttaaaaggagatgcattaaatcaacaattacaatctttgattaataaatatcctcaaatacaaaaaaatatgaagtccgagtttattgcctattacgataaaggtgagaacagagagactgttgctaactatgtttggaacctacaaaaatctataaatgacgttatgcaatcatatcctagcacaaaatttgtacagttttataaagatgatgtttccccgtcaatggtagatggaaatggccgtttaaaatcggatactaatgtaatttccatcgagggaggaaagtataatgagaacaaataatcatataacccatttagatgctattgagttaagtagcggttggaattacaattcgaaattggtagctggcaaaaatgcactactatcagatagccttttaagagatattaaagtattaagttctaatgctaaaggtgacgccgacatgttagaaacggaacttcatgctgttataaacgcaatgtctcaaaacgaaggtaaatctgttgatgcacttaaaaatagtaccgcttctctaaaaaacaatctaaccaaattaaaagagcaactcgataaaactacacattaatttcatacattttgagtgaacagaattatatttccatagcaaacattcctgaactacacatgttacataagagattcatttttgaagaaacgggtaaaatgataaaacaaccgtttttcaaaaaatcaaatattgggaggaataaaaatatgattttacgttacgtgaccaatttaaaacttgcgaaagagctataccaagccagtaaacctaaattgcaagaagataagggtatgattgaactgtttgaacatacttttggtttgcaaaaagaacttgtaaaatacgtcggcattgcagaagcaactactgctgctttatactcagctagctttatcaataaaaacatttctcgccttgcttcgctatcaacaataggtattttaagtgcagctgcttacaaacatttcgaagctggccaaggtaaaaaaggtgcacaacatgcattagatttattaggtcttgctactttaagtttactagatacattttcttgtaataaaaaatagttttcattttagaagcacatactttagcacctgtgtacttttgatacaatccataaacggtacaccgctatagcatgtgttttgttatttttcaggtctatctattgtaaatattccccctaatttagcataatcatttccggctaaacgagaaacagcctgtaatgcgtgtggattgattttaaaattaccctcataaatactgtcatcaatatgataagttacaatttcgcctattattaagtcagccccatctaatacatctccaagcaatatcatttgcgatagtttacattcgaatctcattttcgcgtctttaattcctggcgtcttaatcgttgtagatgttaaaagtgataattctgtacgactcaactcactgtcaccatatgctaacggcgctgcagtctcattaatatcttgaacattatcttcgtctgtaatatgcacaacaaagtctccagtccgttctatattcaatgcagtatcttttctcttacctcctgcacgttgaactgcaatagcaatcattggcggatgattattaactatattaaaaaaactaaatggtgctgcatttactgatgcatcttgatttaatgttgtaacaaaagctataggtcgtggaataattgaaccaattaataatttatagttttctctagcagttaatgattgtgcatcaaacgtatgcataatacctacctcttttcttagtatatctaggtatttctccgatttcggttaatttaaacatctattctcctctgaaaatcacttgtatttatttagcaaatctattgaaatatgacacatatgcatatcttctggatatttttctaaatgttgctgatgttcttcagcacttttaatgtagttagacagcggtaagacttccactgcaattttatctctgtctttacgtcgttcaatgaactgacgcgcttcaattaagtggtcatctacacaactatataaacccgttcgatacttttctccaatatcatttccttgtcgattcacactgtatggatcaataatttcaaataaataattcatgatgtctgtaattgttaacatacgatcatcaaaatgaagtttgacacattcagcataaccatcatacggactgtctaatttagagcttcttccatttgctcttcctgcttctgtatgtataattccaggtattgttgtgaaaaatgcttcaacaccccataaacaccctcctgctacataaacaactgccatatttacacctcatcatccttttttatatttttaacaaggttataccatttaataccgccatgacatgattctgatacaccttcattacgataaccatatttttcataaaaagaaattaatgattctcgacatgttaacgttacaccatgtcgatgttgattcttagcaagattttcaaaatagtttagtaagcgacctgcaataccctgaccttgataatttggtgctacaacaagacctaacacactaatataaccaccttcactattatttgcggggacatttttaaataaatcatcgctaatgtaacgctcttttaagacaggaccgttgatatatccaatcacttcatcattcttttcagctacaataaaagtttcttgaatttgtacaattctcaatttcaatgcctctggtgttgcagcttcttccggtgaaaaaccaatattttcaagtgcaataatttgatctaagtcctgcatgattacttttcttaataccataaaaacacttccttagccttatatatcaaatataataccttcatcattatattcattattttcaaactaccttcactataaaaaacgagtctttttattaaaagccattcaccttaatcaattagacaagttgtattatacgaattagcaaataatcataattataattcattttaagcatactcaaaaagactggtacatgtataccagtctaattcgaaaaaatatatttagttaaaaccatttcaaaaacgacttcacttttcctggcttagtcggtctgtctagataaacaaaattatcattgattactgaactggcatttcgaagtaatgcttcaatgtcattcgaatatttcttcaatttatgattgtgaaataattcttgcatcaaaaatggtctttggtcacatgaatgtgcatctgaagctacaaaatgagccaaattacattctataaattgtaatgataacttttgaatgttttttccaaatccaccaactaaagaactcgatgttaattgactcaatgccccatttgcaacaagttcatataatatttctggatttttggcgatacttctatttctttcaggatgtgcaatgattggtatgtagcctctcgattgtatttcaaaaaacaattgttttgtataatgtggtacttcgcccgttggaaattcaattagtaaatatttcgaacgattaataccttgaatactaccattatctaagccttgcagaatcgaatctgtaattctaatttcttgcccgggaaataatttaatatccaatgcttgaacttctggatgcgttcttaactccgccaatttcacaagcacttgttgaaatgtattatcatatctcggatgcaaatgatgaggtgtcgctacaatacttgttacaccttcatccttagcttgctttaatagtgcaatactcttttcaattgtcttaggaccatcatctatatcaactaatatatggttatgaatatcaatcatgattcatcagtcccataatatgcatagtaactagcacttttatctttaggcattctatttaagactacacctaataatttagcacctgttgcttcaataagttcttttccttttttaacttcatctttattattttccgaattaactacgtagacaacattgccggtaaactttgaaaataattgcgcatctgtaactgtgttcactggtggcgtatcgataattacaaagttataattcatcaataatgtgtcatacaaattcgcaaatgctcttgatgtgattaactctgatggatttggcggaatcggtccagacgtcaggacgtctaaatcttcaatttcagttgagataatactgtcttgataagttgaccaatttagcaataaacttgataggccttcattatttggcaaattaaaaatatagtgctgcgtaggtttacgcatatccccgtctacgattaatgttttatatcctgcttgtgcatatgcaactgctaaatttgctgcaattgtagacttacctgcgcctggtgcctctgaagtgattacaatgctttgaactgcactgtcaggatttgcaaacataatatttgatcttatgcctcgaaatttctcgctaataggtgactttggttgttcatggacaattaaacttgatgtacttcttcgtgtattcgtcatggtaattcctcgtaaattaaaatttttgtattgaacctaaaataggtaatcctagttgcgattcaacatcttcttccgtcttaatacgcttatctaataattcttttaagaaaataatcaatattgctaaaacaataccaacaatgatactgattactaagttaacagatactattggagatacttttacagcattatcatgtgctgaggaaagtattgtaacattatcaacactcataattttaggcatgtcatgtgcaaaaactttagatattctattaacaattttgtcagattcagatttattcccagttgtaactgatacagtaataatttgagagtttgtttgattggttacttttaaaaacgaattcaactcagctgttaaatactgaccatcaaactctctagatactttatctagaattcttggacttttgataatttccgtatatgtattaacagactgcaaactactttgaacattttggaaagctaaatcacttgaggactttttcatgtttactaatatttgagtagaagcagtatatttgtcaggcataacaaaaaaggttaatgccgcacttactacaagacatattgccggtaaaataagcaataatttaatattcttctttagaatatttaatagttttactaaatcaaacttttctttcatggtttcctccacataatcaatcattgtattcattatgtatgttttataaatcggacaattatatctagtttaacgaccacaaaaatacacaactacattttctctaattttttatataaatattttatcgtttaaaattatatcatgattcttggtcgttatgtataatttatttatattttcgtttgagatataatattgcccaacttcaaatatccaaacctatcagtaataaacctagataccatcgtctctattatggctttcttataatcgagtagaagcagcatcattacttgattatttgctctttacaacaccgagcgtgcccgtactcggtaattcaatactttgcgtaacccgtcactgtgagttgggttaatgatgataaagcccacatcttttaaaaagatgtgggtaatttatataatttttatttacattttaaacttataaaaaaagcgcctatgtcatgatttaccatcacataggcgcttatcaataaattattaattattactttccatttcatctaatttatgcggatttcctgtaattagatgacaacttattcttttcaggggaacattacacttttataatatgttcaaagacaaacttaaccattcacaaatataaagaataatattatcaaatcattgaacaaatcgtattttgcaacaattgatatttatattaatgtattgtatttaatttataaaattcatatacatcttaatattctcaatttcgagttgtattgtcaactttatatagatttaaaaaaataatctcatgtctttttttacaaaagtaagttaattattacaaactagtaacaaaaattatttcttcaaaaatatatttagtagcgaatacacttcatctttgaattgacttttactttcttccactgctccaaatttttgcgaaaaggatgctttcaaataccaactttcaagaaacagcaatattaaattctgaaagtcttcttttgtcatctttatttttgattcatcatagaattttgctatctctttacttaatgattgatttaaatcttgtatttgtccgtaaatatttccagaaaattcctcaggcgtattagataattgaacatacattctaatatacctttcttcgatgtcgaaaataaactcaaataagaattgatataaagcatcaattgaatagttcgatttattttgattcatcataataatattattaaggtaatcaaaacaacatttaacactttgttcgtaaatactttttttcgagtcaaaatggtaatataaactcgctttttttatatttacacttttagctatatcatcaagtgttgtaccgtcataccccttctctgaaaataaggttattgcgttatcaataatcttatccttcaatttttaaaaccccctactgaaaattaatcacactatgttacaggaaaattaagttgcaattacaaatatttccgtttaattataacaacaatctattgcaaattaaaatactatcaattaccatatggcttacaacctaactaacgaaaggtaggtaaagaaattgcaattttttaactttttgcttttttatcctgtatttatgtctatttactggattgtcggttcaatttatttctattttactagagaaattagatattcattgaacaagaagcctgacataaatgtggatgaattagaaggcattacatttttacttgcctgttataacgaaagtgaaacgattgaagatacgttgtctaatgttcttgcactcaaatacgagaaaaaagaaattattatcattaatgatggaagttcagataatacagcagaactcatctataaaattaaagaaaataatgactttattttcgtcgatttacaagaaaacagaggtaaagccaatgcactcaatcaaggcattaaacaggcttcatatgattatgtaatgtgcttggatgcagatactatcgttgatcaagatgcaccatattatatgattgaaaatttcaaacatgatccaaaacttggtgcagttacaggtaatcctagaattcgaaataagagttctattttaggtaaaattcaaacgatagaatatgcaagtttaattggctgtattaagcgaagtcagacacttgctggcgcagtcaatactatttcgggtgtcttcactctatttaaaaaaagtgcagttgtcgacgttggctactgggatactgatatgattaccgaagatattgcagtttcttggaaattgcatttacgtggatatcgtattaagtatgaaccgcttgccatgtgttggatgttggttccagaaacattgggaggtctttggaagcaacgcgtgagatgggctcaagggggacacgaagtattactacgagacttttttagcacaatgaaaacgaaaaggtttcctttatatattttgatgtttgagcaaatcatctcaattttatgggtatatatagtgcttctatatttaggctatttgttcataacagcaaacttcttagactatacatttatgacatatagtttttcaatatttctactatcatcatttactatgacttttataaacgttattcaatttacagtcgcactctttattgatagtcgctacgagaaaaagaatatggctggactcatatttgtaagttggtatccgacagtatactggattattaacgcagcagtagttcttgtcgcatttccaaaagcattaaaacgtaagaaaggtggttacgcaacatggtcaagcccagacagagggaatacccaacgctaaaatcatcgctaaacattataagagaaacagcacttatcgctatatcgtgtgtcttttggatatattgtttagttgttctactcgtttatattggtactatatttgaaattcatgacgaaagtatcaatacaatacgtgttgctttaaacattgaaaatactgaaattttagatatatttgaaactatgggcattttcgcgattatcatttttgttttttttacaattagcatattgattcaaaaatggcagaaaggaagagaatcgtgaagtatagaaaattaataattttagtgttgagtatcttgatcatattgcctgtaagcaaactggatggtcatcatattgcaaatgcagatgacgatccacctaaaaaactgaaatataaagaaaatagtgctctggcattaaattatcaccgtgtaagaaaagcgaattttctgaataatttcatttacttcttttctagtagtaaagaaattaaaaattatagtgttagccaatcacaatttgaatctcaaataaaatggctaaaatcacatgatgctaaatttttaactttgaaagaatttttatattacaagaaaaaaggtaagtttccaaaacgaagtgtatggattaactttgatgatatggatgaaactatttatgaaaatgcttatccaatcttaaaaaaatataaaataccggcaactgggtttattatcacaggtcatgttggggaagaaaactttcacaacctcgatatgattagtaaaaaagaactaaaagaaatgtataaaactgggttatgggaatttgaaacacatacccacgatatgcataacttatctaaaaataataagtcaaaattaatgaaagcttctgaagctacaatcataaaagatttaaacaaaagtgaaaaatatctaactaaaaactttaaaaagtcgcagaaaactatagcctatccttatggcttgatgaatgacgataaattaccggtaatcaaaaaagctgggttaaaatacggtttttcattagaggaaaaagcagtcactccgaactccaatgattattacatccctagaatattaattagtgatgatgcttttgagcatttaattaagagatgggacggattccatgaaaaagattagacttgagctcgtatatttacgtgccattatatgtgcaattattattgttacacatttattaacacaaattactttaaaacatgagaatatggaaggaggatctttagtactacagttctatattcgtaatattgtcatttttggtacaccttgctttattatcttgtcacagttactgacaaccttgaattaccaaaaagtcacctatagatacttaactacacgcgtaaaatatatattgattccttacatattaatgggtttgttttacagttatagtgaatcattattaactgacacaagttttcaaaaacaatttattgaaaatgtcctattaggtcaatggtatggctattttatcgttgttatcatgcaattctttattttgagttatatcatttttaaaattaactataacctattcaacagtaaaatattattattgttatcttttattttacagcaatcatttttatattactttacgaacaacacagcgtttcacgataccgtgctacactattatccattaagtgaaaacactataatattcggatggattttttatttctttttaggtgcatatatgggttataactacgaacgtgttttaaatttcttagaacgttatttagttattatgattgtattagctgtagctacttattttgtgtttattgcgttagcaaatggagactattggaacgttaccagcttttcatattcattaacaccatataatagtattatgtttattgttatcttgggtatttgcacgcattttaaaacaatgttatttaatacgattcaaatgattagtgctttctcattctttatttatttatttatttattacatccaatcattctagactcattgtttgcatatacaaatatatttgaggataatacaatggtctttctagcgatatcactactattcattttaggattatgtataggtgtcggtatgatattgcgtgaattctatatctttaggtttattattggaaaacaaccatataaattgaacattaatgcttattaattattaagctatgttaaaaacacgcggtgggcgaaatcagtttgaattgactgacttcgttttaccgcgtgtttaatattgttatacatatattctaattgcacatttaaactacgtaaatgccaatgggagtgggacagaaatgatattttcgcaaaatttatttcgtcgtcccaccccaacttgcattgtctgtagaaattgggaatccaatttctctttgttggggccccgccaacttgcattgcctgtagaatttgggaatccaatttctctttgttggggccccgccaaggtattacttgaataactcttttagaattctaaataatgatccgattaattgaaagaagtctgcagtcattattaattcctccctttactttataaattatgcttgcttagtatcagtcaccttttcagttttcactaaatcgtctgctaaatgatgccaaaaatcttgtaattcttctcttgtgcgcactgtatcagaactatcttgtccgacaaaatcaacatgatcccaatcatgttttgtaggcgttacttgccaaatgcctttttgaattttatccgtcgcatttgtataagcttgattaaatggatgttgagaagaaataacggatactaaaccatcgttttctcgccattctttttcagtagctttaccgattaagttaccagtaatcacaaatgggaaaaacatatttaagtctgctttttgtctatcgctatttaatgctttgtgcgttgcttcaccagtgtatgttttatacacaatgttagggttcaacgacgttttacgatttaaatctgttgcaccctcacgcgtcagatcgtaaaatccattatcttttgatttccataaattagattgtttaacgcgtttgacataatcaatatatgattcatttggcttctgttttagaccccattgagccaacccgaagtctactcttgaatttttattaccaaacattttaccgatatcaaatacaatttgtctcactaaagcttcattaccagctaaatctgaagcatgcgttccattatgtggcgttcctaaagtagtaattgatgaaatcatattgtcattattacctttgaatagtggagaaatttcgccaccatgtttcttttgatactctatttcttcacgactaccattacgcagtaattcttctagttgacgtatcgtttgaccacccatactatgtccaacaaggtgtaccttctgtcctggtttccagtctttgtaaattccttcgtatgtttttccataacgttcatgtccatattttgctgcatgtgctgcaccataatctacacgaccgcctttgatataataataaagttcaactgcgcggtcatagttacttccaaaagcacttatacttgcttcataagctttgtaaccattttcttctaaatcttggcgaatgttcattttattaccgccccaataatgagctaacactgaaggattaatatcatctgtaaacccattgaaaccatgcactaaaacgataggatcttgatttttatactgcccttgtttggcaactttattcgtttgatcacctttcgcttttgcagtaagttcctttgtccctttgtttggtaacgttgctactgcactactttttaataaatttaatccatttttcttgtcattgtcctttgttggttcaactggtgatttttgattgttttttaaatctgaaactgatagtgttttttcgtctttttgaggtttcacttcttgttcattgttaaaattgtggtcagtaattttatcattcgcttgattcttttgttgcggttgtactttctctatttctgtctcattaacaatttctcgttgacttgtttgatctgacttatttaatgatggtgatacctttgttcgactttgtgaaggtagattgttattagcgtttaagtcttgactattatctgcctcttttgactgttgctgtgacgccactttactttgtttgccatcattaatagcctgttctaacccttgatttacatccctaggattagcattgttattttttgttgtatcacgttgaatatttttattattaagcgatgattttttatcatcctttagttgatctttattcaaatcatctgttttacgatgattttcttctgatattgttttatcattatgcaagttcttagttaaattttcagtatgttgctgttcgtcaacaccgttttcacgttgataattagcattttccctagtttgttgatccccaatagattgtgctgtaactgtatcctcctgtgaatttcccatattcacttgcttctcagctgcttgtgcttgtccaccacttaaaaatagtaatgtagctattaaaatggaagatgcacctacactaaatttacgaatactatacttattttgacttttcatcattgtcagcacctctatttttttattttagataaacaaattgataattattcgaggaataaactcaaataatttacttaaccaagcactcataatgaccatcctttctattgtttaatttgatgagaaagcgtttacatttttatttaaaaaatatattctccaaagagaatttaaagtgtatacgctaaccatttcaaattattaattaatattatatttggcaaaatttaattagtcaataattagacacaatttaattatgcaaattgtaacttttttacatatatcttttgtgatttttaatatttacatgcttgggtcttgattccaatgatgtattatttttttagattagctgtatggggagatttatgagctatcacagttataatgtttgctggtgttgtattttaaacctaaaaatatcatttcttctacaatgattgtattaggataagccattacgcttgttcctacattaaatatatacagttaattttcttccctcaaagtaagtatcctactatttttaatttattgtttaattactattgaactacctttaacttaatctcgaatttatgatgattagcataaaaatacaccccataaagttagttttttagtccaactttcgggatgcacatcttagttctaatggagattgtcttttaaataggctatgacatttctatttcaggctagatatatttttattcacagtataaatacaaagaatataaagacaactatgatattaataggtagtaacgacaaacataactttttagctttttcgccatttttcccttcataacttcattatatcgattcatatacttttcaacatctttaacagtgacatctattcctgagttgctcaattcacttttcaaattatctttggtttcgtatcgtgattatccactagttatctataacgagttcgcaactttagtaccatcacagcattcatagttaaaatatgttggtgtcgtattttaaacttgaaaatgtcacgtttcccacaatatttgtaagtgtataagccatgatccttttctctatatctcagtccatacttgctttaccactgttcgatattttgtcgttcgcctttaaagttattgcgcttatgatgtctacgcgctaattctgcctcaatttctgaaaaatcaacgcctagcgcatgcatcaagacaaataaatgataaagttcatctgctacttcacttacaaatgcttttttgtcacctttaattgcttcgattacgacttcaaaagcttcttcaccgtatttttttgtaatcttttctataccttctgttaataaatatttcgtatatgacttttcattattggattgggcactatcttgaactgtctgcgctaatgtttgtactgaaaatggaacttctgtgttgaaacaactttgactgcctgtatgacatgttggtccatttggtatgacatcaattaaaatagtgtcattatcgcaatctacatgaatatctttaacacgttgcgtatgaccagatgtttcaccttttgtccataggcgttgtttcgaccgcgaatagaaacataccacaccatcttctatcgttttatcaaaagcttcttgattcatataacctaacatcaatacttgttttgtttgattatcttgtaaaattgctggcactaaacctttgctaaaatcaattttgtaattggtcatcttactgctatacccccttgccgtatcgcttctttaatagattgaaccgtcgtttctcggtcatgtaatatacttgcagctaaacctgcagaaacatccgtctgatcaaataattctacaaagtgttgtgcattgccaccaccaccagaagcaatgattggaatatttacaagggattttatttttgcaagatgctcaatatcaaagccttgtttcataccatcatgccccatacttgtaacgaggagctcacctgcacctaactgttctacttgctgtacccagtcatatactttaatatttgtcaattttttaccgccatgcgtacaacaataatgtgcttttctttcaggatcataatagctatcaattgctatgcagatgcattgtctaccgaatttatcactcgcttgtttaattagctgtggattttttaaagcacttgaatttaatgatactttatctgcaccatgatttaacaattgggtaatatcatcaaggctttgaatcccaccccctacagtaagagggataaacaagcgtgacgctgtctgttcaatcacttctagcattaagctatgaccctcttccgtcttagagatgtctaaaaatactaactcatcagcacccgcttcattgtaatacattgctaaatcaacaggattcccaatatcccttaatcctttaaattgaatccctttaacgacacgaccatctttgacatctaaacatggaatgatacgttttttaatcattttagcccctcccaaaatgatgcttgatgtgcagcctttcctataatagcagcgtgaacatttagcgacgctaatcgttgaatatcttgctgatgtctaataccaccagacgcgatgacaggaatcgtcgttgcctttactaattgaccagttaattcaaagttaggtccggacattttgccatctttagcgatatcagtataaataatgcctccaataggtatatccgataactgtttcacaaaactaaataaattcaactctgtgtcctcttcccatccgttcactttaatatcttctccataagcatcaacagataaataaatgcgacctggaaatgtatgtgccatctctttaagccattctgtatcttgaatacctttcgttccaactatgcaataattaattcctgcggcaaagtagtccatgatttgtgacttcgtgcgaatgccaccacctacttcaatatctttggttgttaatctcctcaatgacttaatataatcaaactctcgggcatgctgtgccttagcacctatcaagtcgacgatatgaatacgattcacacattcaaattgactatagtaagcaatactttcttcagccgaacgcgacattttttcttcactatcatatttaccctctgttaacctcacacttgttgacccaatcaaatcaatcgctggccataattcaatcatttataaatcccccttgtattgcctgacgcaaaatttgtaacccatatgtaccgcttttttcaggatggaattgaataccaatataattgttaaattgaacaattgctggaatatcagtcccatactgcgcatatgcaatgacattttctgacatcggcgcttggtaagaatgtacgaagtaaacatcttgatttaacataggatgcttactcactaaattattccaacctaagtgcggcactgggtattctgtttggatacgcgaaatatttcctgggataaaccctaatccagatgcatcgccttcatcactatgctcatacattaattgcatgcctaaacaaataccgatcattttcttatcagtattcttagccaatattgcatcgagatttaatcgctttatctctgacatcgcatctttaaaatgaccgacacccggtaatatgattgtttctgcttgatcgattatattttgcttatttgagacaaccacctcataccccaaatgttcaatagcacgttttacattactaatattccctaatccataatcaacgatgacaatcattcaatcacacctttcgatgacggcacacgctgatcatcagttgcagttagcgctatgcctaatgcacgggaaaatgctttgaatatagcttcaatttcatggtgtgtattacctccacgaattaaatcaatatgcgttgttaatcttgcattgattacgactgctctaaaaaattcttctactaactccgtatcaaacgtaccaactttttctttacttaacgttgcattgaaagataagtatgggcgcccacttatatccacaacgacacgtgctaatgtttcatccattgaaatgtacatcgttccataacgaacgaaatgctttttatctttaatcatttcaagtaacaattggccaataacaatgccgatatcttcagttacatggtgatcatctacatcgatatcaccttgtgcctcgatgtttaacgatagtccactatgaaacgtaaacaaggttaacatatgatttaaaaagcccacacctgtattaatatgcgatggtgactggtcatctgatattgaaatatttagttgtgtttcagctgtgtttcgttgtttttgataaatcatattttgcactccattctttaacaatttcttctaattgctttaactgtgatgctgttgcaattgaatatcttacatagcccttcatcaccggctcatcataaaaacgaggtttaaatccttgttcatatacgtattgtcctaattgttgcgccgctgaacctttagtaagtacaaaattagcatttgatgggaatactgacattttatctgcaacatgtgtatcaaatatttgttttaactgctcagctaactgtcgttgcattgttaaaaatcgacttgtctcttctctatgtctaaaaatataagtcgcaatatttagcgtaaatacatttaatggatatggatgttctattgtttgaatacgctgtatcgtttcaacagtactcattaatacacccaaccttaagccggcaattccaaacgcctttgataatgtgcgcattcttaaaatgtgtggtgccatttcaacatcatatgccttgccataatctaaatatgcttcatcaatgacaaagtatccatttattgctttcatcttatctgcaatagctgttaaaaatgccgtatcaaattgcttgcctgaagggttatgtggattactcataataaaaaatgatggttgtacttcatcgattttcgttaaaatggtttccaaatcaaacgttaaatctgatcttgcatctacaaatgcaatttcacgatttacttgtgccgcatatgcttgatacataaaaaaatctggatttagcgttaataccggaccttctggcatgatcagcattaacttttgaatcaattcatcagagccatttcctgcaataatttgttcaggcgataatccgtaaaacttagcataagcttccttgaattgttcatatgctgcatcaggatataaattatatggcgttgcactaataatagacgtcattgttttttgatccaacggcgtaactggactttcatttttatcaatataaatcatttcatttacactcccctaagactgacgtattaaaatagactgttggtgattgtataatgcttcaacatgagcaatatgttgtgctgaatcagcaatttgatcaaatgtatcttttgataaatgaatgaccgtgttccgtgttaagaaatcattgaccgataacccattggtaaatctagctgttctatttgtaggtaatacatgactaggtccagcgacataatcacctatgacctctggcgaataatgtccaataaacaatgcgctcacatatttcactttttcaatatatggttgaggatttactgtttgaatcgacgcatgttcaggcgcgattgtattcataacgtggcatgcttcatcaaaattactagcatggataaggtagtgttgattagcgatacttttagaaacaatgtcgtatctgtccacattaggcaatgctttagcaatacgtgattctaaatctttaaggacttgcgcatcttcactaatgacatatgtacgtgctaattcatcatgttctgcttgcgcaaatacatcatatacgatggcatctaaatctgcggtgtcatcaataatcagtgctatttctgttggtcctgcaatttgatcaatacctacctgtccaaataaatattttttggcatatgcaacaaattggttacctggacctacaatcttatcaactttaggtatcgtttctgttccataagtcaatgcagcaatactttgagcaccaccaacttgaaacacttgattaacttgcgtaatataacatgcagctaatacctcttgggatactccgttaggttgaggtggtgtcacaacaacaatattttctacacccgctacttgtgctaaagtcgctgtcattagaaccgttgatggataacttgctttgccaccaggcacataaatacccacactttctagtggatggtatatttcatagcactccactgattcttctaactgttgattcatctgcttaatactttcttgatatgctttaattctttcataactttgttgtaatgcttgttttgttttttcatctaatgtgtcaaatgctgctttaatttgttcatgactaatttctaaatgatctgttttcgtatgatcgaatgttagattatacattttcaaagccttatctccatgaactttaacttcctgacaaatatcgcgaataattggatacaatgactcatctaatggtgcttctaatgaaaattgatttaaaaattgttgtgcattaagcattggcaatagacacctccaaagagcgaataaattgctctattaattgtgattttttaaaataagctgctttattagttattaaccttgcattgatatcactaatatgttgcttttcaaccagtccgttcgcttttagcgtagtacctgtttgaacgatgtcgacaattccgtctaccatatcgacgacacaagctaattcaacagaaccattcaatttaatcaattcgacatcaatgccttttgatttaaaatatgtttcagcagtatgaacataactcgttgcgattttacgataattggtcgtttcaggtttcgctgcaaccgcaaaatgacatgctccaaaaggcatattcaacaaattattaacattgtaatgacgctcatctaaaatgtcgctaccaacgataccaatatctgcaattccttgttccacatagattggcacgtcactcccttttactaaaatgcattctatattatctacacttaataataattggcgttctctattttttaatgtttctgataatgtcgtaaattcaattgcatctaaatagttaattaaactatccattagacgcccttttgctatggcgattcttaacattgtgcatactcccttacttaaagtgttaatcctaatccaaacccttcgatgcttcctttgtaataaccacctgttaaaactcgagattcattttcagcaaaatgacattgaataaataaacctgtgtaataggatctaggtggctgcgcagtaatatctaaatggatgtctttgtaaccttgtgtatgtaaccaacgttcccatatttttaattcaacgagtgctggatggtcatttggaatatagtgttccaatacatttaattgttgttgcgtattctctttcaagatttgcacgattggatgttcagtcgacaaatatgtaaccaatcccgataaattacgttcctcaatcattgatagtatgtctggtgtttgtaacgatttatcgagtaacgcatcaagcaattgataatgtcccaatacaacaaaatgcacgttgtctctcaactgctgttgaataaactgaataaatagctttaagctctgttgtacattcgctaatgatggtgcatagttttccaaaccaacttgtacagccgcttcattattccgaatgattaaacctgtgtatgccacttttgttgctgcagttggatacattgagtaataacgcaataattgatctgtaaaatcatttcgaagtgcataaatttgatgctcatgttgccaaaaatttcgctcacccatctgctgcaaatcctcatggttcaattgtttccagtccaacttttcaaccaaactaaaatcaactaactcataatctgctttattaaaatattttaaaaatgctgtttccgattcttttaacgcaattaattgttctgaattattcactcgaccaccctttactttcaatactgtatttaaaatcacctggtatttttgttgttcactttacttctctaccatactaaagtgtaatatgcttaataacttatcatttttagcaatacattacaacatttttcagaaaattcggtgtattggttttaaattttttcaaaagaaaaaggcaagacatttgtgcctataaaaatgcttaaccaagatttttatattgaagttgtacttcttgcacatattgtccttgccttattatgtaaagttattttctttctatctttttattaaatttaactattcttcataatcccgattacctttaaagaattgtctatcttgtttactatatacattttcaggattaaaaaacggtttgagtttatatttaaattcaaataagtttagaccatcaatcgcaaccctatcttggtaaacgttcgttgctgatatatctgtaaaattgtttggaccgacacctgcaataaatttaaagcctgctttatcgaccaaataatcatacgcttgtgtatgtctatcctgtgcgccatgtggaaatacaaacatatctgttttacctacaattggttcaacttcatctttccatcttttagtatcacgtttaataccatctaaagatgttttttcaaaattaatgtgaccatatgaatgactcgcaaatgaccatccatcccgtttcattgcgcgaacaacttcctcagctgcctttttattctttgtataatctttactcgttaattcattcgtgcgatatcctaatacaccctcataaccggttaaagcaacaacacctttttcaccatttaaagaaaaatctggatgctcttttacaaatttatttaaaattggcacgatatcattgtcatcagaataagtagcatggccttttgagtctgtcgtttcagatacaacatgcttatttttatcaagtactaagcggtcagcataaccatggtgtctcatgtaactatagtaattcatatcatcaattgagatgattagcggctttttacctttcggcaattttacttttttggcttttacatgatgagatgataagtcgtatacatcatgtggattaacgatgatgtaattatttttatataattcgttcaatgattttttaaattcacttacagtaatcatccaatcattgttgcccttagcttggtgtgtatctcctgtaaacgcaacttttgggtctgtaattaatggatgataaaacacatgataaacttggccgtgatatgtttcccaatgttcatccattttcgatttatgcattgcatactcatttggattaacagatttattttgagctttctcattttgcttggaacagctatataacaatgcaactgataataacagaaaaaatagcaataaatattttttatgcattaaacattctccctatgttttattatgcacaattataacatttttattatgtggctcataactttttaagaaactgttgggattttaattttattttttagataatgtcatagtattttatttataaaacacaatatctccttgattgataatgtcgtccattgtatcgtctcgcttgaaattaagtctttctgctaaatttattgaacgttggttacacttatttgtcctgataacttttactgtttcttgatcgatataattcacaaaatttgtgattgctgtaatagcctcacatgcgtacccttgtccttcaaaacttggatgtaatttataaaataaatttaatactgtttcttgctttaattgtcgatattcatatccacaaataccaataacactacaatctatttttttcaccaatacaaagtaaccaaattgatattgttgccaatggttttgccatttttcaatccaccgttgtgtgtctaatttggaattatgtaaacctttgggagtgtatatatttgcttgtggatgactacaaatattataaagatcaattaaatgcgaggaacttggaatcattaaatttaatctttcagtatttatcattaaatgtctccctcctatttctatttaaagactatttatatgaatactaatgccacgggttgaaatatcgactattatttaaaaagaataatgtaactactaacatcagaagtattaacgtcaaacacaaaacaacataatcatctttttttaattgttttttgacgtaccaggttctccttttatactgtccgaattgtcttaactccatagcagtactaatagtgtcaattctttcgatactagaaaatattaaaggtaacacaatgcgtttgatacctttaacacggctagtaaatttcgcctttttcgaattatcatatcctcttgcttgttgcgcttgtgaaatattaaaatatgtttcttgaatatctggaatataccttaatgctagtgatactgcataactgattttataattcacacctagctgatttaaacttgcagcaaaatgactcggattcgttgtgaataaaaatattaacgctaaaggaactgtactaatatattttaatattagattaaacagatagaataattcctgtgatgttagcgtaaatcgaccaataccattgattaactctgtacgctgattataaatcttcacaccatattcaggatcaaatatatatacggcaataatatttaatattgtgaaaaacagaataaatttaacaacaaaacgaacttgtttccattcaatatgagcatatttgaacaataaaatagatgaaacactaattaaaattaaatatcttgtgtcataagtcaccattgcagaaatagaaacaactaataagaataaaagtttaacagtcgcatttaattgatgaatacgactatttcccgggtgaaaacctatagtattatattgattcattggcgtctcaccttcctatcatggttaataaataattgtattaatttctgtggctcgctaatccctatatattcggccatttcaaatagcgatgtttgtctcaatgatgcaatctcacagatttttttatcatttaaaaccaatactggcgtggtatcagcaacgacttgaccttttgataatacaactgttcttgaactatactcagacaataaatgcatatcatgcgtaatcataataatcgtcttcccctgtctgtttagctcaattaaaaatgacattatctcattataatgatagaaatcttgaccagcagtcggttcatccaatatgattatttccggatttaagactaaaacagatgctatagtgaccctctttttttgaccatagcttaaagctgcaattggccaattccgaaatgcataaagtccgcatattttgagcacattctctactcgtatctttatatctgattctttcatacctcgtgctcttaaccctaatgctacttcatcgtaaatcattttttcggaaatcatatgatttggattttgcatcacataacctatgaattcagatcgttcgctaattgacaattgattaaatcccttattacaaaattggatattacctgttatatctaaaaatccacaaattgctttagcaagtgttgatttgccggcaccattgtgaccaactatactaagcatttctcttctataaacatttaattgaacattattaagtacactattactatagtcactatattgaacacacacctcatttaattctaatagcggttcagatttgtacttattatcatcatttgaagatgttttatctatccattttttcactttaaatttaacatgttcactcatacaaacttcacgtaaattcgctaagttatcaatggattcaacatctacttctgcatatttaagcgctgtacagtataatggttcacgtattcctgcttctttaagcttagatgattttagcaaatcactaggcgttgtattagcgatgatttttccatctttaaaaagaagaactctatcaaacgtatcatctaatgattcttctaatcgatgttcgacaataatcatcgttgactttgtttcttcatgaatattatttaacaatctcagcgtttcatgtcctgtcgcaggatctaaattggccagtggctcatccaatattaaaataggggtacgatggattaatataccacctaatgaaacgcgttgtttttgacccccagataaatcttgcggtcggtgatttaaatgttctatcatatcaactttttcagcccaataactcacgtttttcttcatatcatcttgttcaacacaattattttctaataaaaaggccatatcttcagctgctgttaagcctatgaactgtccatctgtatcttgtaaaactgtaccaacaacattagatcttttatgtaaacaactaacagttgcatcttgattatttatatgtagttccccagttacgttacctttagttttaaatggaattaatccatttatgcaatttgcaaaagtcgatttaccactacccgaagcaccaactactaatactttttctcccggataaatatcaacatttatattctgtaatgtaggtgttgcttgactatgatattgaaaactaaagtctttgaacgagataattggttcagtcatgatatatcattacctttctacattcatttacatatctgattcaacaaaataattattctttacgtaaactacctttttttatttgagatgaagcatatgcttttaataatattgtcccaataatgccaactgaaataatatttaatactgcagagataacaccttgtgtataaaccttgttagctggttcgttataaatcaaaatatctaatgttggtgcaataagtgcccagcaaataatattcgcaataatttgaccggtattaaaataaatcatcgacttcctagaaaatcgtcctgaagaaagatttaattttaggccaatccatccatataaacagcctataattcccgagcaaataacccaactccaccaggcactaccgtatgtagtgaaatctttaatagcgtgaccaattaatccagtcattaaaccagcaaaaggtccaaatattgcagatattaatgctaaaaatgcataagatgtttctatattcgtattaggaaaccctgttggtattacaacaaaacgccctaaaattacaaagaccgctgctcctataccaattgcaacaacagttttaactgaaatatcttgttttttcatcttcattactcctcacataaaaaattcattaaatcgatggtgctttagataaatgaatcgtccaatcatttccagtaccaatatgatataaatctgaaaatgagtcttgattgaccgctacaccaatatttactagcgagttaacatacacaagaggttcacccacattaacatctgcaaacgatcgcgcaaatttaataatattttgatagactttcttatcttgatgataaattgttaccaccaaattattgccatgaacaatttccaaggattttaagaatgccaatggaatatttgtccataatgacccaaatctgatatctaaaatatcaatacttcctgtaacagaatcctcattttttgtcgcttcacttatttctaatgcctcaatactatcaacattaattgcctgaccgagacgttcaaacgctatcttatttgcagctaatctcgctccattgtatgcataaacatctctaccatgaaaagtatgactttcttccgaatgaggcaatcggcttttcacttcatcaatttcgataacttttttaataccttcataatgtttgatatgacttaaagagccattatcaggtgtaataatgtaatgacctgaatatgttaagcaagcaatgctccgcctatcactacctacacccgggtctaccactgatacaaaaactgtgcctttaggccagtattttacagtttgatataaacgatatgacgctacccaaatgtcatacggtggtatatcatgcgttaagttttcgacacgtatatcatcacttacagtatatgcaactccatacattgcacttacagcgccatcactaagtccaaaatctgattgcaataccaaataatttcccataaaatgcctcctttttttaaaacttcaaaaaatattatctacatatttaaggttatatattttgaattttcagaattatattaaaatagtacgagtcacttgttacaaagtcaatagtagcgactataaaaatgataataatagtcagatttatctcattaactaaatttattgaacgttggttacacttatttatgtttgaattaattgactagggtataacaatagtgtggtgttttatagatatgtcttttatatgcatcataaaaaaatattcgaattcaaaataaaatgcttgcatctttgtttttcaagtggtatcgtatgtatatcaagtataaaaaatatatctaagagataaaaatatggaggttttatattatgacaaactttacttttgatggtgcacacagtagtttagagttccaaattaaacatttaatggtttctaaagtgaaaggttcattcgatcaatttgatgtcgctgttgaagaagatattaatgacttcagcactttaaaagctactgcaacaattattccaagctcaattaacactaaaaacgaagcacgtgataaccacttaaaatctggtgatttctttggtactgatgaatttgataaaatcacttttgtgacaaaatcaattacagaaagcaaagttgtaggtgatttaacaattaaaggtatcactaacgaagaaacattcgacgttgagtttaacggcgtaagtaaaaatcctatggatggttctcaagtaacaggtattattgttactggtataatcaacagagaaaaatatggcattaactttaaccaaacacttgaaactggtggagtaatgctaggtaaagatgttaaattcgaagcatcagctgaattctcaatctcagaataacctcatctcataatcctcattgattttaatatatacgaaatgccaactatatcatccctaggtatagttggcatttttctttaatttatgattcactattttaacatttaaacttatattaagacgcccttcattcaggcagatcttattgaaactgataacttttatgcccttttgcaaagccattaaccgtataaagcatagatcctccgtccatttctatatcattggaacaaatgatgagttgatttgtgccaggtataaattgcggatgcgtagaacgtaacatatgcccttcatctcggcttggtatcaatatttgtcctattggataaccccttttattaaaaactaacactcgaccttgaccatacattgctacgtataaattatcgtcactatcgatacaacatgagtctggtccttcatgacctgtaaaatagtacggtatggtaactccaaatggttgtatcgtcacaccatcatcttcaagtgcaatgcgatgtaatcgattggctgtagtttctgttacccatagtactttttcatctgtacttaaagcaataccatttgctacgctaatattttgaataatcggcgtcactgttttaaagtctggcgtaacataataaacgcctcctagtgggttggtagagtatcctctaaaatctgtaaaataaaacccacctttagaatcaaataccatgtcatcaatacaatattctgttgatagatcttcaatgatatcttgtatgttgtcaccattttctgtcgctgcaaaaatgcctcctgtagatttaaaatctcctaaataacaaataaataatcggccatctttatgtattttgattgctgcaggatttgctttatggcttacaaaaggccgcttaatttctttagtttctggatttactttaaaaatatttccttcgaatacatccaataaaaagagttgtccctgccgatcaaagttcaatccttctagttgcaatcctttcttggaaatttcaagccatggttcagctgtaattgtttgtaattcactttcagatataattggaacagcactattagacttcccgctataaaataatgtaggtaaatcttgttgtgacatcatgatcattcctttcatttcattcgttttaactatcattttcattttaaacaaggtaactatcaaatcaaatgataacgttttcatttatctattttatcggtctagtggctgatttcaagctagaaatattgaatgacaatacaactctgttaaaatgatggacgtagacaaatatgcgtattgacgctttattttaaaaattaacatgcttataacatgtttttagaaggagattaacctatgaactatcaagttcttttatattataaatatacgacgattgatgaccctgaacagtttgctcaggatcacttagccttttgtaaagcacaccatttaaaaggtagaattcttgtttctacagaaggtattaacggcacattatctggtacaaaagaagaaaccgaacaatatatggcacatatgcatgccgatgaacgattcaaagatatggtgtttaaaattgatgaagctgaaggacatgcttttaagaaaatgcatgtacgtcctcgaaaagagattgttgctttagatttagaagaagacgtcgatccaagacacacaactggccaatatttatcacctgtagaatttagaaaagctcttgaagatgatgacacagtcattattgatgcacgtaatgattatgaatttgatttaggtcatttccgaggtgcaattcgtccaaatatcacgcgctttagagatttgcctgactggattaaagagaataaagcgttatttgcagataaaaaagtggttacgtactgtactggtggcattcgatgtgaaaaattttctggctggttattaaaagaaggtttcgaagatgtagcgcagcttcacggcggtatagctacatatggtaaagaccctgaaacaaaaggtcaatattgggacggtaaaatgtatgtatttgatgatcgtatcagtgttgatatcaaccaagttgaaaaaacgattattggtaaggattggtttgatggcaaaccatgtgaacgttatattaattgcgctaacccagaatgtaataaacaaatattagtttctgaagaaaacgaagctaaatatttaggtgcatgctcttatgattgtgctaaacatgagcgtaatcgttatgttcaagcaaataatattagtggtaatgagtggcaacaacgtttaacaaactttgatgatttacatcaacatgcttagtattaattaaatacctttcaaaacacgctttgaaaatccgatttataaaggtttttcaaggctgtttttttatgcgcatgcataacctgatatgtttttaattatgcgcatgttatactaaattaaattttaatactgcggggtgtcttaaaatgcacattttagtaacagggttcgcgccttttgacaatcaagatattaatccttcttgggaagctgtgactcaactagaaaatattattggcacacatacaatcgataaattaaaactaccaacctcttttaagaaagtagatactattataaataaaacgttggcatctaatcattatgatgttgtactagctataggacaagctggtggtagaaatgccattaccccagaacgtgtcgccattaatattgatgatgcacgtattccagataatgatgattttcaacctattgatcaagccattcatttagacggtgcgccagcttatttttcaaatttaccagttaaagcaatgactcaaagtattattaaccaaggacttcctggagcactttcaaatagtgcaggtacgttcgtatgtaatcacgtactttatcacttaggttatttacaagataagcattaccctcaccttcgattcggttttattcatgtgccatatataccagagcaagtcgttggtaaacccgatacaccatctatgccattagaaaagatagttgcaggtttgactgcagctattgaagctatttctaatgatgaggatttacacctagccctaggcacaacgcaatagttataaatgcacaaacaaaatacattccttaaatgactaacaaatttgttaatagggtaatacttacggaagtatgttttatttatgggggcggaattaataatgactacaaaaacagtatttgatgtcattgatatgggtttaggatatttagtaaatgtgtatgatacttggaaagttgaaaaggtacttgatgattatcataagcctttttctaataccattcattggcaatttgggcatgtattaacaatttttgaatcagccttagctgttgctggtaaagagaatattgatttaaatatatatagacctttattcggaaatggttcgtctccagatgaatggaaggatgaagtaccgagtattgaaacgattttagaaagtctccaaacattacctgaacgtgcacgaaatctaactgaagatgatttagcaattgaattgaaacaaccaattgtcggttgtaataacttagaagagttattagtattaaatgccattcacatcccacttcatgctggtaaaattgaagagatgtctcgtatattaaaaaattttaaataaatatgtgcttattaaccgttaacaacacgttaacggatttttttattttttaaaaggccactcttagtctgcttacatacagattaaaagtgacctattaatatcatgtattatacatagaactaagaatagccttatctataaaaataattataatggtttatgagttaaatctttttcttaaaattaaatacaatcccaatatacctataaatacccatgtaatccatgaagttataatcttcataccagtttttggtaattcttttagaggattttcaggtttggttttattatctttaggttgatcatccttatccacttttgatggcttatctgggggagttggtttaactttattagaatgatcaggtttagttggtggtgttttgtcttttggtttttcaggatagattggtttattcggtttttctggcgtatatttattcgtcacaatcaagttgcccatatcattgttatccacatgcgttgtatagccattaacttttgttaattcctcgactgtgtattttacttgttgaccttttgctttttcatctaatcctgtccacgtatgtgtccagttattagattcatttaatgttgctgtttttcctgttgcttttccatcttgatataactcaactttgatttcagttggtcgttttccgtcttggttattattgtcatcccaattttttgttactgttgccgatgtctctcctggtgtatacttgttcgttattgtcgtaccgttgatgtctgttgtgtagtcttttacgtgatcttcggtcactgtatattctattttctttccttcatcatacttcggtaagtttttaaattcgtacttccagtttgtttcagatgtcacgtctaacgtttttactttctctccgttagccaataaattcacactgactttttctggtctcttaccatcttgattgtctttgtcgtcccatactttttcaccactaattgatgttgtttcgattggtttttcagtattagtaaccactaaaccatcttcttttttagtatatccttctggtgttgtatctttaccttgagcatttacttctttaactaaatatttaatagtcttgccatttttgtcattttccggaagattagaccatgtcacttttgtcgttccatcttctaattttttaatttctgctttgtctactggtgttgtgttttgattgtcatcttgtttgtacaacttgaaataaatcgttggtttcactttttgagtgccttcccaaaccttttgagcagaaacatcttttgttttttctatctcttttgcattttcaatagtcgtaaaatatccctgattatctgtatctttcatagtaaacggatattctttatccttatcaaatgtatacggtgctggcgcctctatttcttttaaaatatagtctccgctaggcaacgctttaatattagcaataccgtttgcatctgttttaatctcaatttctttttgattgtcctttacaactgatccatcttttttagaaagtttaaattttacattagctataggagccttggtatctttatcctgttttaaaacttttaattcaccttttacagtaccttcaataccggcattagcattaatattatgcacagtatgattaaatgctttcccgttcacttcttccttaccatgctcttgataccaagcttgtgaattattaacaaactctttttgctgttcattcgtaattttggttttgtagttaattgaaaaactattaagtgacccatagccttgtggaattgttacatcaattgtgttcttcgtattatcaacagttattttagaacctggaaaggctttttcaaaatcagtaattgcatttggtccactataataattgctatgtgtacctgtcacattaatgtttaatgtgcttaaatctaactgctgtccaccttgaatctgatcctttatagtaatatctttcgatacatatcttttttcattattaatatttaaaaaccatcgtacatgtgtcgtatcttctggcagcatatctcccgttttataatagaaaacactacttgttcccgcttcacttttatgaaccgtaacattcgttgatttattcccagatgttatcgtagctactttgtcatctgaagtatttgtttgcgttaaatttcttccttgtacttcaaattctgcaaatcccgaaacatcacttaatttttctactttatcattgaatgtaattgttgctccgtctggcgtaataactgcttgacccacctgttcacctttaacagttaatgatactgttttgctataaccctctatctttactgtaccacttgtcggccatgccactttaatcgtgtcaccattttgtatttttccatttttatcgtcgaacgtcatttttactgtcgttttaccaccatcttctatcttagacggtgatacagttaaatctgtaacattcgttgatgaaatatctcgtgctgcaaatgcttcatttttattaaataaaggtgtgatgatatttaataacattataaagaccataaacttcaacacatttttgttcataaaaacccctccttatactctatgtcatatccacaggatactaataataaattataaactaatttagttcttattcaatgaaatttatcaaaaattcatattattattttattatgcaaaatatatacagtataacgaatacaagtgcatgaagttaacttgtatcaattaatttcttagtatattagttcattttcaaaatcttttaaatttaataaacaccaactataccagttcttcactgcttctcgaaaaataattatattaatgatttcgttaatttaattttatatttaattattactgtacatcttttgtagttagctttattcttaaattgaaatatgtataaaacatagaaagaaggacgttttaacatggaaaacacggttaaatatcgtaagtttatactccctatcgttgtaggtctcctaatttgggcacttacaccttttaaaccggatactgtggatccaacagcatggtatatgttcgcaatattcgtcgcgacaatcattgcttgtattacacaaccgatgccaattggggctgtctctataattggatttacaatcatggtactcgttggcattgttgacatgaaaacggctgtcgctggttttggtaataatagcatttggttaattgctatggcctttttcatttcaagaggatttgtgaaaacaggtcttggtagacgtatcgcacttcatttcgtcaaattatttggtaaaaaaacattaggcttagcatattctatcgtcggtgtagatttaattctagcgcctgctacaccaagtaataccgcgcgtgcaggtggaatcatgttcccaattatcaaatcactttctgaatcatttggttcgaaaccgaaagacgaatcatcacgtaaaatgggtgcatttctagttttcacagaattccaaggtaacttaattactgcggctatgtttttaactgcaatggccggtaatccccttgcacaaaatttagcatctagcacatctaatgttcacattacatggatgaattggttcttagctgctttagttcctggacttgtttccttaattgttgtaccttttatcatttataaaatttatccaccaactgttaaagaaacaccaaatgctaaaagttgggctgaaaatgaattagcgactatgggtaaaatcgctttagctgaaaaatttatgattggtatttttgtcattgctctaacactatggattgtcggaagtttcattcatattgatgcaactttaacggcctttattgcgctagcattgttattattgacaggcgtcttaacatggcaagacattttaaacgaaacaggtgcttggaacacattagtatggttctcagtgttagtgttaatggccgaccaattgaacaagcttggatttattccttggttaagtaaatccattgctacaagtcttggtggattaagctggcctatagtactggtcattttaatattgttctacttctattcacattacttatttgcaagttctacagcacatatcagtgctatgtatgcagcattactaggcgttgccatcgcagccggtgcaccaccattattcagtgcattaatgttaggtttctttggtaacctattagcttcaacaacacactatagtagtggtccagcgccgattctcttctcttcaggttacgtgactcaaaaacgttggtggacaatgaacttaatattaggtttcgtctactttattatctggattggtttaggatcactttggatgaaagtaattggtatattttaaaatgtttaaattagggagtgggacagaaatgatattttcgcaaaatttatttcgtcgtcccaccccggcaaggttgactagaattgaaaaaagcttgttacaagcgcattttcgttcagtcaactactgccaatataacatcgtagagcatagaacattgatttatgtcccagcctgtttttaatttgtatttaaaatcaatctttgctaaatcaagactcccctttttaaaatacgtttatcctttaaatcattgcgtacttcactgaaaatttgtataaagatttaagtcattacgtaacatcacataaaatacatttctatattaatccgcttcattgattaacattacttatgtatcataaatcatcaaacaaaaaacactttcgcttaaattcatttaattatgaattcaacgaaagtgctttattttatatttaatttttcaaatttatacggctgtcactattactgcacacatacctcagtctcaccttaacatagcacaaaggaagttgaaaacatgtataattatctctcctcgcattttatagggtttttgcgaccggatgtttcttcaatttaatgtattgagaaagactatataacacaatacctgtccaaataaatataaacgtaattaattgatctatactaaaaggctctttgaaaacaaatatgccgagtacaaacattattgttggtccaacgtattgaataaatcctattagcgaaagtggaatacgttttgccccggctgagaataggattagtggtattgccgtaatagcaccagaaaataataaccaaaatgatgacatgttcaatccaaatgacatctgatgttgctgccataaataaataacgtatatgagtccagcaggtgcggtaacaatacattcaatcgtaatactgctgatggcatcaatatgtactactttttttaataatccgtatgtaccaaaggataacgctaatataatagagacgattgggaattctccaatcttgagcgtcatatataatacaccgatgaatgcgaataaaatggctagccattcaaatttattgaatctttcttttaaaaagataagtgcgagcaaaatgctaacaagtggatttatataataacctaaacttgtttgtagtacgtgaccgttcgttacagcccaaataaatgtaccccaatttaatgtgataacataacccgctacgacaattgctagtaattgaatgggcttggctaacaattgattcatatctcgttgaaatgcattgcgttgtttttgtccaaccgcgagtatgaaaatcatgaatattactgaaaatataatacgaaaggctaaaatttcaaatgcgcctattgcatcaacgaactgccaatatataggtagtattccccacagaatgtaagcactaagtgctaaaaatataccttttttatattctgtattcacttacatacctccttactctcccaaatttttaacatgttacgctcacttagttaagctaatataacgattttactaataatatttcgataaagatatcattttgtttatattttccacatttattcgccaaccactaaacaatattaattttataaataattctgtacaaatcagggtatattgccagaaagactaccaaacaacataaaggatggatacaaatgactttacctaaaattggaaagcctgcaacacgtgcattaaattcacaaggtatatacacattagaagatgtatcacaatatacaaagtcatctctaatggagatgcatggcgttggtcctaaagctatatcaatattggaacaagctttatttcagcaccaactacattttaaaacggaagttcattcatcattaccttttttattaacaggagacgtgccatgcaatcatgcccctaaacgtcaacaaatgatagattttatagttgctacagcagcattagatattgaattattacgttcactggttacaacagaatttatttggtctgtgcctggacactttgacatttatggacctcaaatattaattcaagaactatctaatcattataaagagattgcttcgctcaatattcaatccatcatcacacatggctatttcggttccatgcacggtagtcaaatattaaaaactggtaaagagattcattttgctcatttttttgaatttgaaaatcataaaaaggatgccaagttaagcaaagtgacatcttacattgttgttggttaatgactcaaattatatatcgcaaaaaattcttttgcttttacatgtatatttttatataacaaataattttgcataactttttgttatatgaacacttattactagagtgcacattgaacatacagtatgattaaatatcatgttatgaaagaaggatatattttgactgtttttaaaaatgagcgcttaagctggttaccatacatagctattgtcattttgttacacgttattgggtttagttttttatggattgctggaaaagaccatcatatcttatttggtatggggattcttgcatatacattaggtttacgtcatgcatttgatgctgatcatatcgccgcgatagataatacggttcgcaaattattacagcaacgcaaagatccatctggtgttggtttctacttttcaattggacattcatctgttgtatttttaatggctgtttttttaggggtatctgtaaaatgggctaaagatgaattaccacatttccaagatattggtggaacgattggtacactagtatcaggtttctttttagtgcttatcggtgtgttgaatctaattattttaatctctttaattaacttgttcgctaaattacgtcgtgaacacattgaagaagctgaagtcgatgcattacttgaatctagaggatttgtttctcgatttgtaggaccttatttcaaattaatcacgcgtagttggcacgtattgccacttggctttttatttggacttggttttgatacagctagtgaaattgcgttactcgctctttcttcaggcgcgtcacaacaggccatttcatttatcggaatcttatctttaccaattttattcgcatcaggtatgagtttgttggatactttagatggtgttgtaatgaaatatgcctataattgggcattcttcaatcctattcgcaaaatctattacaatataacgattactgcgatatccgtcatagctgcattagtgattgggatgattgaattgctgcaaattcttgctgataagctagacttacacggtgcattttgggcatttattagttcaatcgaatttgattatttaggctatattctagtcgctttatttttaattacttggcttatttcgagtttaatttggaagtttggtcgcatagaacacaaatggtctaaataaagtaacttgtcttgcaatcatctttttattattgcgtttttagacaccctgcatactgactcctttagaatacgctctcagtagtcatctttaaatcgtttcttttagagatgacctcattttgagagcgtatttttctatctaaaatagatcttgtaaaatccagtgctttattatttaaaattttagcatttctgtttacaattctcttatagtctttaatacaggaggcgatatactaatgaatattgcaaagttagaagattatctacaaattgaaccaactcgttataatcaaccgagtattgaagcattaaattattatgcgactcgctttatgttaacggtgcctttcgaaaatattgatgttcaaaatggtaaaccaatatctgtagatatcgatgcacttttcaataaaattgttcatgataaacgcggtggtttttgttatgagttaaacacatttttcaaagcatatttacaacaaaaaggatttaacccagaattaatgtcggctaccattcatacacccggtggcggtcgtagtcaaaacggttcacatgcatcacttgttgtttctattaataatgtcttttatgtaaccgatgtcggctttggagacttacctctaaatgccataccgattactttaccagatgatacacagcagatcactgatatcagtgggacattccgcgctattttcaacagtgaggataaggacattttctatgttcaaaaatatgaaaataatcattggcatacaaaatacgaagctgaattcaaggctagagaaatagaagaattcgatcaaaacattgaatataatcaaacacatcctgattcagtatttgtaaaacatttattaattacaatgccacaatcatttggacgtgctacaatgtctgaaaaccatttaactttaacaaaagatggaacgccagaaaagttagctatcacaaaagataactataaacaatttttaacaaaatattttggattaaatgtaacaattagtcgacttgaaaacagcgacaattaatcataaaaatacggacgtaacttactttaatgtaggtaacgtccttttttaatacacatgttcgttaggatgtgggaaaaaatgatacagcgccactaacaattaatgatttagtggttctcacacattagccagagctcgtgtgtacttataaatagacattcatgcgtaaaacgcatgaataaaaaatactaatttctaaagaaaaagtatttctttattgacactctgtgcaaacacaacaaaaaggatatggcacaaacttcatgccacacccttcttttgaaccgcttcattttacttaagcaagtgcatctacaacataaatgacacctacgaatacaaatgcaatagcaatcatcgtcgaaataaagacgatacccattaatggattaaataataaaatgacaccgaaaacaatacctaataaattaaaaatcactgaaattagttttaagctaccactacctgaaaacgtaaataatccagcaatagaactaaaaataaaccaaaatgcaaacatgtagataaaaaatgccgagctagcaccaacattaaaaatgacaataagaccaaatagaatatctacaatccccataaacagaatccaattttggttaccaccaactaaagctttggcttttctacgataaacaatttgaatcacaccattaatcaatacaaataatccaattaaccatgtgattgcataaaagttttcaattgggaatgtaaaaataacaactgctaacattaataacaacacacccataatcaaactagaccatttaattccttgatttcctttttccataacaatcatttcctttcaaacaacgccttctttatattttaattagtgtcactattattcattgtttaaattccctcatcttaacttatagaaacatttcctcagtgcaaatactgtgatgctcaaattagttgaactgctttccaataatccaaattcacccgagaaaatcacgatatattaatatctttcaactatgtaagattcaaacattgaattgtaagtttagataaaggctactgttctacttattatttaaaatgaatttaaatacaaaaggagtgatactatgacgatattatcagtgcaacatgtttcaaaaacatacggtaaaaagcacacatttcaagcacttaaagatattaactttgacatacaaaaaggcgaattcgttgcgattatggggccttctggatcaggtaagacaaccttattaaatgtactaagttcaattgaccaaatttctagcggtagcgtgattgctaacggacaagagcttaataaacttaatcaaaaagcacttgccaaattccataaagaatcattaggtttcatcttccaagattacagtattctgccgacattaactgttaaagaaaacattatgttacctttatctgttcaaaaaatgtcgaaagcaacaatggaagaaaattataaagcaatcacaacagcattaggtatttatgacctaggaaataaataccctagcgaattatctggtggtcaacaacaaagaactgcagcagcgagagcatttgttcacaaaccacaaatcatatttgcagatgagccaacaggcgcactcgactcgaaaagtgcaaatgatttattacaacgtttggaagaaatgaataaatcgtttgataccacaattgtcaaggttacacatgatccggttgcagcaagttttgcagaacgtgtcatcatgctaaaagatggccaaattcatacacaactttatcaggaaggacgttctaaacaggccttttatgaagacattgtacatcttcaatcagtattaggtggtgtctcaaatgacatttaaccatatcgttttaaaaaacttacgtcaaaacttaaaacattatgcaatgtatttattttcattattttttagcatcgtcttatatttcagttttacaaccttacagtttactaaaggtgtaaataatgacgactcgatggctatcattaagaaaggtgctttagtcggatcaatatttttatttatcattattgtcatctttttaatgtatgccaatcatttattcgtgaaacgtcgtacacgtgaatttgcgctatttcagttgattggtttaacacgacaaaacattttgaaaatgttagcacttgaacaaatgattgtatttataatcacaggtgttgtcggtgtattatgtggcattgcaggtgcacaattattgctttccattgtatctaaattgatgtcattatcgattaacttatcgatacatttcgaacctatggcccttgttttaactattttaatgctaattattgcgtatatactgattttatttcaaagcagtttatttttaaaaagacgcagtatcttatcaatgatgaaagactcagttaagactgatgttacaactgcgaaagttacagttatagaagtcatttcaggcgtattaggtattgctatgattgcactaggatattatatggcgacagaaatgtttggtacgttcaaagcactaactatggctatgacatcaccgtttatcattttatttttaacggttgtaggtgcctatttattcttcagaagttccgtgtcactaatttttaaaactttgaaaaaatctaaaaatggacgcgtatctattacagatgttgtatttacatcttctattatgtacagaatgaagaaaaatgccatgtctttaactatcattgcaattatttctgcagttacagtaactgtattgtgtttcgcagcattatctaaatcaaataccgatcaaacccttacatctatggcacccaatgattttaacgtggtcgcctctcaagatgcgcaacaatttgaatctaaactaagccaacaacatattacattttctaaaaattattatgaaactattactgtagataatgttaaagatcaggttattactttggaaaatggtagtgattcaggtcgcacgaattctattttaagtgcaaatacaaagttaactggtaacaatgccatcattacaaatacaaaatcacttcctaacgtgattaatattcatttaaacaatgatttagtagtaaaaggtacaaagaacgagacttttcgtgttacacaagaagacaaagacaaggtttatcctttaaatctaagctttaattcacctgtcattgaagtaagtccagaaaagtatcagcaattgaaaacacaaaataacgttcatactttttatggatatgatattaaacaaacatcacaaaagaaaaaagctcaagcaattgcaaaacagtttggagacaaaatcatcacttatgatgacatgaaaaaagaggtcgatgctactaacggtattctaatattcgttacttcatttttaggattagcatttttagtagcagctggatgtattatttatattaaacaaatggatgaaactgaggatgaactaagtaacttcagaatattaaaacgcataggctttacgcacacagatatgcttaaaggattattactaaaaattactttcaacttcggtttaccattattgattgctatattacatgcagtattcgccgcaatagcatttatgaaattgatgggtaatatatccttcatgccggttattatagtaatcattgtatacacactcatttacattgtttttgctttaatcgcttttgtacattcaaataaattgattaagaaaaccatttaacacttgtgattaaaagatgattcattgagattttgattttaagcaatgcagtataactattaactgatttataaaaaggagagattgaatcatgaaatttagagaattagtaaaacaatcatacgaggatttaaaaaacttgactgtaacttggtataacgttattgctttagcaattattgttattgtcttaagcaccgttacaacaccaattataggtattccagctggtttattaggtggcgcttattatttaaaacgccgcgaagaaaaaggtaaataagccttctgtgctaaactcaatatgtatttcctaccaaagaaaacataaggagttagtacagaatggcctatacacaccttaacacggatgaacttacgttcatagactcatattatcactagaatctttcagttaaagagatttcgagtagattgaaacgttctagacagacaatttataacgtaatcaatgcttttaagtcgggtatgtctgcccttgaatattatcaagaatacaaacaaagaaagtctaattgtgggagacatagaatagtgcttccagaagaacagtcagattatatccgagagaacgtagctgatggatagacacctgatactattattggcagaggtgaacacacgatcaattgttctgttaaaacactttacagaatgtttaaagagaacatttttgctgtacatgatttacctatgaaatgtaaaagaaagccaaatggccattctgaaaaaagaggtggatagacttttaaaagacatatttctgaaagaatagaagagttccctttattcaataaggagtttggacatctcgaaggagatactattgttggtcgtcatggtagtgcaatcattactttggtagaaagagtatccaagatgattatcaccttacgatccttaggtcgtaaggcaactgatatagaaaatgctctgaactcaatgttttctgctttaccttctcatatatttaaatcaattacttttgattgtggtaaggagttctcaaactggaaaacaatatgtaactgtcacgatatatctatattttttgctgatccaagcatgccagcacagcgaggtttaaatgaacattctaacggaatacttagacgcagtggattagataaggaactggatttcaatttagtaacggatgatcatatcatcagtgttgctcaaaaaatcaatcatcgtcctagaaaatctttaggttatagaacaccattggaagtatttatgagtttcatcaaagatgataaactgtccagcttaatttgacaatctaaagatttataaaaaagccgttggtctcttcgaaactacggcttttctctgtgctataaaatcagtatggcgaagcacagtgatcattgaattctgactttatataaccaagagtatctttggatacactgatgatatctataacagcattgctaatgtagaatatattttcttgattatagaatacaataaatggctccactaaaccttttttaatatataaagaataatcaattaagtctttgttttttatatttttaatagttgcaataacatacttctcatcggcagaatggatttcttcgtaccagttagtaatattaaaaaaacgaccaattcttgttttttctctaaatttaacaggatataagtattcagacaaaaatgtacatttcgtctttgattggttattaaatataacattaataatattagaaatttgctttttattgagaacatcaatatctaagcgtatcctatttttctcaggtgattgaaaatagggaatttcatgttctaaatcaaaatgtatttgttgtgtttcaaggttaataatcattttaatctccaattctttttaggttagcatcgtatgtaccacttcttgttttcttgctacctaaattcttaatactgcttgcacctttccatgctcctcctcggtgtccatctttatcgacagatatatattgaggacgccctttactatttttcttgaacacttttttgccatgggatacatgctttgtagcagaataacccaattttttagctgcctgcgcggcaacttgagggcttgtacgaatcattgatgttacaactgtcttaccatatttttgaatagctttcttaagtccttgtttggcgatgaatcctactaatacagccactacaggtgcaattgaagctttaacctcattcgtatcatatattattttttctcccgtatcttggtcggtaaattctgccttaaagtcattttcattaacaatccttaaaaatttaacatcataagttttatcaagtttattattataattatcttttaatgaagcatctacagtaattttatctgtatttaggtcgtgttctaaactgctttcaatgtttaaatctttagatttaaagttattgtcaatgtaattacgattatttttactgtaaatattctcgttaattttatttgtgtttattttactattcgaattgttaatattagcttcttttataaccacagaagcttctgcaaagtttccgtaagtaaaagttataataattgctagaaataggataattatcttgtttttcatgttttctcctttgatgcgttattttattggatattcttttaaaatatgtggtaagtcatttcggaattcaagattatttgtcagataagcagtgaaataggcggctgcaaaagatgttccatttacagtaagtaactcatcttttgatccttttgtatatacgtctacgccaggagctttaaaatcgatttttttagtaggtgcatatataaatggcttattgtttttgtctattgctgtgatagaatatacttcgttaaaacgtgctggatagtcactataatcatccatgttattccctgctgcggctactaagataatacctttatttttagcgttctttatagcatcatgtaattctttattgtaacgctgaaagccaaaactcatatgaataatatttacgtcatttttgatactccaagttatgccttttattatgttgtctatatcgcctttaaggttatcatctaatactttaacgtcataaatacttactgatttactgataccaatcaacttttctttatgttctccatatgtgataatacttgctacttgagtggcgtgattactatctgtagttatttgattatgattgtttatagcattgtatctttttgtaacaaaattattgtttattcttgtattattaatacccgtatctaaaatagcaacttttacattggatggctttgaatcatttatacatatatttagactgctccatgcccaattatttggttgatttaataaataaaacgagaaagaaattataaatatagcgacccctatggataaatgtattaaattacgactcatatgacacctataatttttagttaactctttctgcaataagactgtttagaaagataaaaactcattaacttgaatttatacatatatatgtatattatttatattttcttatattcaccaatttgtcaatatttttttgataaattaacagatatatattttgtagagctctataagatatacaacgtcaatcattttacaaaagataaaaatggtatcagtatttagaccgatatatcaatataattgataaattttcaaatgcttataaacccctttaaatcaacgtttctaaggtttttaaaaatctttttgaatttattttcaaaaaacactgtacattatgccaatatgagcgtatagttggacttacgtaataaaagctcgtgaattaaattgtagtgtatttgtttagaatatcctcttttttagttatgaatttgttacaaatattaagtgcaaaagcacacggaggttttctatatgaataacggtacagtaaaatggtttaacgcagaaaaaggttttggtttcatcgaacaagaaaatggcggagacgtattcgtacatttctcaggtatcgctagcgatggctacaaaactttagaagaaggtcaaaaagttactttcgaaatcactgaaggtcaacgtggagaccaagcagttaacgtacaaactgtttaatcttacaaaataaaacgactcattataaatgaatcgctttgattaccaacaaggttctaaatcttgttggtatttttttatgctattttagataatataaataatatgaggccataccacgatgatttataaaaacttatttgccagatgcatactaatcaaagctataagaatgattgcaccaacaaatgctatgaaagaaagtacacctgtttttatatttctagctttagtcgtttgtacttcactaggatcttttccattcataaaagcaacaattcgatcgtagttatccattttatgcacttttttaaagtcttctattttcatagatgcataataacctattccataaatgactatcaccgttataccccaagcccaattccaataaacaactaaaggtcctgttaaaattgcagctagtgtcatgaaaataagcatcacatatgtccataagttaagacttcgttgcgctttaatatcaggtgcaaatggaatggtcccttttactaaatcatctaaagttacattgaacaaatcacacatcattaataagttatgtatgtctggtaagcttttgtcattttcccaattagaaatactctgcctagatacatataacttttcagcaagatattcttgtgaataaccatctcgttcccgatactttttaatttgtttactcagattcaattacatacgcctccattcaattagtacaatcattacaatcagactatcagataaagttaaatcaagtcacctatatgattgactaaatgttttgacatactacaacatcagggttcgaagactcccttaagacagacctgtatgattacgcgcttgtaattttctcaatgccaacttatttattaatgatgcaacttttccatgctattcaatgcttgcgaagttagtcctatttaagagattacgttcacactatttactattcgattttccagctttccaactatgcttttctaatcttttttgtgctataaattctaccgcttcaaaaatacatactgcactgatgaaccagcttaggaaaccaacaataatgctaatcaaccacatgtgcgtcatatgtaacatcatccatgtaactaaaatacaaactaatacccctgtcataccaaacactgcgccacgacttacatgcacagcgactttatcaccatattgcatacctgtaataaacatagacactaaaaatactgccggaaacgttgcaaatataccgccaaattctttccaaggtagtgttacagatacaatataacttaataatactgcaaatccccccacaaaaaatttcattaatgttaatttcatgatgttctgcctccaataatttattacttaataactgaatacaactaattatcacgcattttccaaactataaatgtctaatactgaatattgcgagggaaataacaaaccaacaaacaactgtgaatattgcgcctttccgataacctttatgcttaatatagagagatgtcaaaaatacagttaatatacaagacagaataccgacaattgctccagtactaagattcatcgacatctccactaattgcgtaccacgatgatccaaagctaatgcgataatagccgcaagaaagactgccggcatagtagctataatacctcctaacttaccacctaccttatcagcaataattgaagctaatgcaacagcgataccaccaatgacaaaatgaagaattgcacttccaattgaaaacatcttcaacgtacctttctataattaattcaatacaaaacgtatcattcacacaaagtgtaaaacttaaattttctactgtaaaggcaactcaagcgatgttcataaagctttcatgatactttcataaactagcaataaagggttcaaataaaggtatatccagctcaaattagggagtgggacagaaatgatattttcgcaaaatttatttcgtcgtcccaccccaactcgcattgcctgtagaatttcatttcgaaattctctgtgttgggacccacaccctaactcgcattgcctgtagaatttcttttcgaaattctctgtgttggggcccctgactttaattgaaaaaagcttgttacaagcgcattttcgttcagtcaactaccgccaatataacttcgtagagcatagaacattgatttatgtcccagcctgatcaacatataaatataaatttttatgtttcacgtaaaacaaaaaaagacaaagctgtaatgatcttagctttgtcttttatgtgttagtcatcatgtatacgacatcctactactaacgtttatatattcgaatttttatttcataataatcttcatgatctttgtctttatgctcaacatgtaatcctatttgttgaatcgcttggatacttttgcctacctcatctcgtgcttgcgtgacatcttgttcaaagcgaaggttttgtgctttgactttttcgggcccagttttttggcgtactctatcttcagtctgtttcacatttagtttttgtgcaatgacttgctcaatcaacgcttcttgttcgctatcagacaatgataataccgctctcgcatggcgttcagtaattttaccttctcttaagcgaagtagtactttcggcgccaacttcaataaacgcaacttatttgcaataaagctttgacttttacctaaactttttgccaattcactttgcgttgtatcaccaatttccaataatttcttataggcttccgcttcttcaacaacagacaaattttctctttgaatattctcaattaatgccacaacagccgtctcttcatcatccatatcacgaataataacgtctgcttgaggtaaatttagtgattgtattgctctaaatcggcgctctccagcaataatttcaaacatatcttcttcaatcggtcttacaacaataggctgtaataaaccatgttcatgtattgattcagcaagttctttaattttatttggttcaaatacctgtcttggttgataacggttgggaacgatacgttcaatttgaatggattcaacattactattgcgattttcttcaatatgtccaatgatgtcatctttgtttttcaaaccaaataattttgaaaaaggttttttcattatccattcgctccttttatgttagttgtaaaggattatgcattatttttcaagtaaaggagtcttattaggcgtccctggttttcttggatactttttcggcgtctgtctttttttatcaataatgaacatctggcgctctccagcatcttctggcaattcaaaggtatgtgtttctgtaacgttaccacctaacacactaattgcaaattttgcttcttctaattcttcttcaccttttgaagattttaatgcaacaaactgtccaccttttttaactagcggtaaacacaattcactcaacacggataatctagctactgctcttgcagtaacaacatcataagactccctgtagacacccttaccaaatgtttctgctctatcgtgtataaagctgacatcctgtaattgtaattctgacgctaaatagtttaaaaattgaatacgcttatttaatgaatcaacaatcgtcacttttaactgcggaaacattatttttaacggaatacttggaaaaccagctccagcgcctacatcacatatacttataggctgattaaaatcaaaataaaaactaggtgcaatggaatcataaaaatgtttcaaatatacatcgtgttcatctgtaatacttgtcaaattcatcttttcattccattcaacaagtaaacgataatatgtttgaaactgttgtttttgagtctcagttaattcaatattatgttcttttaattgttctgctaaccattctacagtcattagtcactcaccctttggagtttaccttgttctaagtaaatcaataatatagatatgtctgctggatttacccctgatattctagaagcttgtgcaatatttaaaggttttacttctgataatttttctcgcgcttcagtcgccaaactatcaatcttactataatctaagtcttctggaattttcttctcttccatacgtttaactttctcaacttgttgtagtgatttattgatataaccttcatattttgtttgtatttctacttgttcttcaacatctgcattcaattgatgttcttcttctaaaatttctaaaattatatcgtaagtcatttcaggtctgcgtaataaatcgatagctaaaataccatcttttaagcgagaaccaccatgttgttcaataatcgcttgcgtatgttcgtttggtttaatacgaatatctgataaacgcttaatttccgcatcaatttgctgacgtttttcattaaaacgtgcatatcgttcttcagaaatcataccaagttcatatcccatatccgtcaatctcaaatcagcattatcatgacgtagtaacaaacgatattctgcacgtgatgttagtaaacgataaggttcattagtacctttagttacaagatcatcgattaatacacctatatatgcatctgaacgacttaatatcttttcgcctgtgtttaacactttacctgcagcgttaatacctgccatcaatccttgtcctgctgcttcttcataaccagatgtaccattaatttgacctgcagtgtataggtttttaatcattttcgtttcaagtgtaggccataactgcgttggcacaatcgcatcatattcaattgcgtagccggcacgcatcatatctgctttttcaagacctggtatcgtctctaacatttgacgttgcacatgttcaggaagacttgtagacaatccttgcacatatacttcatttgtattacgaccttcaggctctaagaaaagttgatgtcgcggcttatcattaaatcgaacaaatttatcttcaattgaagggcaataacgtggcccggttcctttaatcatccctgaatacattgcagatagatgtaaattatcatcgataactttgtgtgtttcagcattagtatacgttagccaacatggcaattgatctaatatatattctgttgtttcaaagctgaatgcacgacccacatcgtcacctggttgtatttcagtcttcgaatagtcaattgtttttgaatttacacgcggtggtgtacctgttttaaaacgaacaatatcaaaaccaagttctcttaaattgtctgataatgtgattgatggtaattggtgatttggtccacttgaatacttcatattacctaaaatgatttcaccacgtaaaaatgttcccgttgtaataattactgctttagataaatactctgtaccaatatttgtacgtacacctttaacttcattatcttctataataagttcgtctaccataccttgcattatatgcaaattttcttcatcttcaatcacgcgtttcatttcttgttgataaagtactttatctgcttgcgctcttagtgctcttacagcaggtcctttaccagtatttaacattctcatttgaatgtgtgttttatcgattgtttttgccatttgtccacctaaagcatcaatttcacgaacaacgatacctttagctggtccacctacagatgggttacatggcataaatgcaatattatctaaatttattgttagcattaatgttttagcaccacgtcttgcagatgctaaacctgcttctacacctgcatgtcccgcacctataacgattacatcatattcttgaaccacaatataaacctccttatttgatatcttactagccttcttaagacggtattccgtctatttcaattactatttacctaagcagaattgactgaataactgatcgatgagttcatcacttgcagtctcaccaataatttctcctaatatttcccaagttctagttaaatcgatttgtaccatatccataggcacaccagattctgctgcatcaatcgcatcttgtatcgtttgtcttgcttgttttaataatgaaatatgtcttgaattagaaacataagtcatatcttgattttgtacttctccaccaaagaacaaatctcgaatttgtatttctaattcatcaataccttcttgttttaacattgaagtttgaattaatggcgtatcgcctatcatatctttaacttcattaatatctatattttgctctaaatccattttattaacaattacgattacatcttcatttttaaccacttcatataatgtgtaatcttcttgagtcaatgcttcgttattgtttaatacaaataaaattaagtccgcttggctaagagcctttctagagcgttcaacaccaatcttctctactatatcttctgtctcacgtataccagcagtatcaactaatcttaatggcacgccacgaacattgacgtactcttctaagacatctctagtcgtacctgctacctcagttacaatcgctttattatcttgtattaaattatttaacatcgatgatttacctacatttggtttaccaacaataactgtagataaaccttcacgcataattttaccctgcgcaccggtatctaataaacgattaatttcctgtttgatttctttagactgctctaaaagaaattcagtagtcgcatcttcaacatcatcgtattcaggataatcaatattcacttccacttgagcgagtatctctaatatagattgacgttgttttttgattaagtcacttagacgaccttcaatttgattcatcgcaactttagaagctctatctgttttcgagcgaataaagtccataactgcctcagcttgagataaatcaatacgaccatttaaaaaggcacgttttgtaaattcacctggttcagccattctagcgccatatgtcatagtaagttccagcactctattaatcgttaaaataccaccatgacaattaatttctataatatcttcgcgtgtaaatgtttttggtgctcttaacacagacaccataacttcttcaaccacttctttagactctggatcaataatatgaccgtaattaatcgtatgtgatggaacatcatttaaaagatgttttcctttatataatttgtcagcaatttcaacggcttgcggtccagacaatcgaacaattccaattgccccttcacccattggtgttgaaatactcgtaattgtatctaaatccatattgctactcgcctccttcaacgatgtgaatacattttaaagtaaattattataactctaaggtaagtcttacgtttgtctgaggtaagactccggggtgtgttgagtggttaatgttttcctctctttcccctaccctatccttacttaatctttttattaaaaactttggcaattttaagtacgtgctcaagactattctgtatttgtaaagtggtcatatctttagctggctgtcttgctattacaataatatctttggccaatatatgcgacttatgtactttgaaattttcacgtattgctcttttaatcttgtttcttaacactgcattacctagttttttagaaacactaatacctaagcgaaaatggtctatttctttattattacaagtgtatacaacaaattgtctgttggctacagaatgaccttttttatatattctctgaaaatctgcattctttttaattcggtaagctttttccaataacatcactcgcttatttatcgtttttatttgaagctatatttaaacttctattgagcttataacataaatttctatttattcttaatttaaacgaaaaaaagatcactgatgagtcagtgatcttatgcagataaaactttacggcctttacgacgacggcgcgctaaaactttacggccattttttgtgctcatgcgttttctgaaaccatgaactttactatgtttacgtttatttggttgataagtacgttttaccatgcaaaacacctccatctttatacagttatctaatataccagattatgcagactctgatcactttaatagataagattttgcgtttcttagattaaaattctcgtattagctcattgattatctagtcataattcaagcaactactacaatataacaaaatcctttttataacgcaagttcattttatactactgctcaatttttttacttttatc
